United States Patent Application Publication US 2026/0191916 A1 - sequence listing, part 67

SEQ ID NO: 457 - DNA, 3435958 bp, Odoribacter FBI02593 (residues 1-1,717,979 of 3,435,958)
  source 1..3435958: mol_type = genomic DNA
gatactgtctcgaactcgctctgccgctcggaggctcttgcacaatatcagacaatcatccgcataacggacaaatcgatatcccctgcgttccagttccttatccaactcgttcagaaggatattgctcagtaccggacttaaaggaccgccttgaggtactccatcgggcgtttcttcgtatttatgtgatactagcacgcctgcattgaggtatttgtgtatcaatgacactaccctgccgtctttcactgtacgggatagcacctctatcagtttactgtgattcactttgtcgaagaatttctccaagtccagaccaatacagtagcgatagccttggtttgcatattcctgcaccctttgtagtgcatcatgggcactacgatgagggcgaaaaccaaaactgttgtcgctgaactgtggctcataaagtcgtatcaggacttggctgattgcctgttgcacaaagcggtctactacggtcgggattcccaaggaagaagaaggtgcatcgtgcattacgacacaccttcttctcgcatcacagttcacacaaggttatcgctcatcaaattgtccagagaaaggagtaactttctctttcaatgctttaggactcaaatacaagaaaccgattttgtaaggttttcttgcagtcaatacatataatgtatcgctattcacttgctctatatactctgcagtcttatattcttcccacttaccagtttcttcatctaaataaagaccttttactattaactttccttctttgatgtaccattcttttaaatccaatgtttttacatttaaagctttacaaacaccattctttttaaattgaaaacctttcttttctccggttgattcgtaagtataaggattataccatttccctacaatttttttccttaaatcatctgcaaaaccattagtacataaacagattaaaacaagcgatgccatcaatgtaataattcttttcataagtcaattttaattatagattattttactaaatcatattttctatcatatcccctttcatttatattgattccttctaccatccaacagggcgcaggggcctctttcaaataatggtcaaagaattgcatcattcgtatagaccagtcacgttgagcttcgacatttccaataaaatgaccctctcctttataattcagcagccacaccggcttctgtaaacgccgcaatgccaaaaagagattacgtccttcgtggtattctaccgcctcatctttatcattatgcataatcaaaacaggagcagtgatcttatctacattgaaaattgaagaattgcgtatataagcatccttatcttcccacagattcttacccatacgacattgccaatcttcatacataaacattcgtgtactaccactgccaattcgaagggcagtataggcttctgtcaaattcacaaccccggcaccgatactggcacaacaaaacatatctgtcattgtaatcaattgggaaactgtacaaccggaccagctatgaccttgcacaccgatatgtttaggatcagcaattccttcatcaataatatattttacaccgcttacaacagcatcataaacactctttgcaggctctcctagggtaaaatatacatccggacggaaaataacatatccgtgactcaaaaatgttggtatatccaacattgcgctactccaacccggtacttggtacatgtgcatttcttgagcgtgagtctcgtaatagttcactatcacaggatatttcttggaaggatcgtacccataaggcaaatataacaatccctgattggacttacccgcaccatttgtccattcaaccattttcacactaccccattgaaagccgttattgtcaggattcgcatcactaacctgcttcattttctgcgtctgtaaatcatacacccatacattacgtccctctgtaaaactctgacgagagtaaacaatcttgcgcccatcattacttattccgcctgcttgcaacataaaaggtccgaataaatctttctgtaattttccgtttgtggtcatacgaccaataccctgattacgactcttccagtccaacaactccagataaacaggcttactttcatcaattgtcaattcttctatggaataaacattcaaaaagcgcaacacaatcccttcctgacgtccaactcctttagtataacatattgttttagaaaaatcattcatatcgacccgccaaatatcaaatctgtcatagatataagcataacgtccatctttgctccaacctgccaggccataaggagaggcaggaagcggtttgtcatgcaactcatcatataccggatagtctattgtttctgtaatattatcaaccttaaatgtttccggattgatacgataccaaacctttgtctcatcatcaaaataaactacaaatctaccatcaggagaccaaccagcctgcttggtctgctccttggcaaactcacgcatttctcctgtttccagattcaccagcaaaaagtttttacgctctgcatattgccagtcttttctacttttaaattctgaattatctgtcaataatacaaaccgaggcacatctatcggctgataacgcatagaagcatagattcccgaacaaacctttgttactttttgtgttttggtattataaacatacttatctggttttggagaatcttttctgtaaccggattcagcttgcacagactgaatcaccggatcattccaactccacaattcaagttcaaaagcagaatctttttttaccgcagattccctttttgctgcaggacggattgaactatatacttccaattcccaaacagtaccatctcccaacatcctcgaattgttaatccgatttttcaagtctgaaggcaaattccaagtacgagtatctgcaatatttttcacgctcccggtcaaatcaaaattccacatctgtgaaccggcagtcttgcttttggcatattccaattcaaaagaacctagcttgccatcaaagttaaaacggctcaacagacggtccggatcacgaaaaagaaccttatagctattaggcttgaataaatccccatatctcaattcatgctccttttctcccttccaaacatatagtatattccggtcgctatttaacaacttaaaaccacccaaatggtcatatacaacactatccttagttcccaaacgccagaatatccgtttgtctcctcgtgtataatttaccaaagccgtttccgtactgcaatccggatctccgtccttattccaaactatctttttcccgctgttcaaatctaccagacagaatggagcctcatcgctttcatttgtctctgtatagtaaatccaattgccgccggcaaagaattccggatattccacattctccatcaccttggtttttccggttttggtattataaaaataatagcgattttgaattttttccggttgctctgcacgctctatatacacatatcgaaatttcacccacaacccgttctccgatatggcataatcatctatccgtttccagcaggcataagctgccgaatctatttccggtcgggaagcccaaagacttcccgacaacagaaacaatgccagtaaaacaattatatttttcattattaattaataaccactccgttgaaaattcataaactcttctccagaaaaatcccctaacaaatatttggcaaaatgattgcgcattttaaataggaaataatcatcttcagaacctaccaaaccatgagtactttccggcaacgcaagcatatcaaaattaataccggcatccatcaaagctcttgccatacggaaggtatgtgcaggatgtacattatcatccatcataccggtaaccagtaataagtgacctcgacaattttttgcaatatctatatttgtatgaattggcaatgcttcaaaacgaatactgtctgccggatttttctcattctttacaatcttctcgcgaactccgttgttcatttcaatccaaccggtattatagatacggttatcatgattacctgcggtagccacagctgctttatagaaattagaagaacatatagcagcagccgacataaatcccccaccagagtgaccaaacatacctgcttttgtcacatcaataaacggataccgtctagccaattctttgattgcagcttgatcatcagccaatggataatctctcaatttaccatatccataacgatgataggcttttcctctcaatggagtaccacctctatgacctacttggataacaataaaacctaactgagccaaacgagtagctttacttgattccaactcaaaagaagtcggcacatattcaaactgcggaccaggatacacttctgaaataatcggatatttacgggttgagtcaaaatccatcggcttccacatcacgccatacaaatctgtgataccgtcagcagctttcactgtaaatcgttccgggaatctccatccctgctctaacaaaggcttcagatcaggatctttcaatttcatgatttccttaccgttacgattgcgcactacagctttgaaaggcatatcgactcttgaataagtatcaataatatatttcgaagaaggagatacaaaaaccttatgatttgcattacccggtgttaacaattccatgcccggtttatccaaacttacacgataagccatataatagtaaggatcaacaccttcttctcttccataagcataaagatacacctcgcgacgtgcagtatccaccttaatcacctgaccggtcaagaaatcaccttcagtaacagcacgtttcatttggccggttttaccatcatacaaatagaaatgtcccaaacctgtacgctctgaacggaaaagaatctcgtctgcatgattcaaaaagtgagtctgtgctaccacataatcaaaataaggtttgtcaacttcgttatataccacccggatatcccctgttttcatattatatgcacacaagtctttttcatcccatgaacgtctcgtgcggtaaaagaagaattcagaaccatgtcctgtattgtcataagcaaaatctacatattggtctttccatttttctgcccaaatttcctttacatctttagtctttacatcaatcaatttaaagaaatactgacctatatgctcatcgccgggacaactgtattgataatccaccaatttaggacgcggctgattcaacatatctacaatatacattttgccggttttacgttcatcgctcatttcaaccaaaaaagtattggtatgtttcaaccaacggccagccggataggactcttcttccgggttttcactcggatatttagaataagaatatgcacgttcaccatccgttgtcaattgcacaatcgtagtatccatacctttagctttgtttccatagcaatacaaattatgcttataagcataaatataatagctactatcaggagatatcatatggccggaaggagcaatatattcatctttattttcatcctttttttctatcttggaaagtttccttgttctcaaatcgtagttgaaatttgtcccgtcatgtgaaaaagtaaagcttttcccatctttcgaaaatttcatattcacatattccaatacagtagaagtatatgccttacgtgtcaattctgccatttgagccaacatacttttcatattgaaaagctcggtatgcaatttcttggaaggatctaccagatagtaattcacaccttcgcttgtacgtaatcgataccagaaaacatcggtttcattgataaaacgaggataaacacttacatcatttcgaaattctttcactatattttcgaatttcttgatttgagcccaattagctttatactgctgggccattacaggcaccagcatacaacttaaaataagtaataaaaaaagtttgtacattatttgttaatttaaattaaagaacaagttacctccatcgccaatcttacttaaaagattttttattttaccatagttatttttagaaacatatattctatttttaaactttcctgcatttttccgttcaatttcccaaatttctatcgtaccatcctcaaaagcgattgccattgcagttgggtaatttccataaactgacgatatcgaacaatcttctattgcgacaatctctttatcaaatgttttcattgtataaaaatcttcattaaactcattatcaatagcataaatagtttttccatcacaataataagtataattcaaaagcttattagtacacatacccaccaaatttgaaattcctttttctttggttagatttaccttataactagatatcacctctattgatgttaaagttgcttcgcttaaatcaaaacaatgtaaaatataatcaccttcctctgtctttgtcattacagacataccagactctccccaattaccattatttcgccaatcatcccacactatatcacctttgatatctttaaaatctaaaacatcatctcctactatttccaagcggtacaaattattatcacaattataatatcccgaatatattccaacatagttttgttctcctttctcattttcctccaaagccaacaatgcctttattttataaaattgagtaaatagtatatctgaaaactttttaccattccacaacttaatatcatctgaaaaatagcccgtatgataacctccactattttcagaacgacgagtatacatttcgcctgattcatctaaaataaaactatcataaggggtatgtattacttttttaggattaaaaaattcaggcactttttcatcaacaaactcttgttctatataagtctctctcttaatattctctccgttcaattcttgtactcgtaccttatcattttctttggttaacagtgttatttcacctatagacgaattgccatcataactccaatgttcagtcatagataatggtttcccctttatttgttctccaccatttgcagacacatatatatctttccactctttatcataaatcaacgtatctggatctgataataatttagaacgaattatcgataattgagtctggccattttcttctgacaaaataagtaatccttcaataaatgcagattgaacttctattttaaatacataacaagatattgcctcagtcaaagggtctatcattcgcaacattgcttgatgcgttccattttccttagccgtataagtaaatattttttctgttgataccacttcatgatctacgctccattcaaatttgactccttctatttctgtctctgtcaaatcatacttaactattgctttcggagcaaaagtaactgattctccttgtgttaaaatattagttcttgcaactcccttcacatctaattctcgagttgccttataatcataatttccattatcgtctatacatcctgcaatcacaaatacaaacaacaataacaatatgtttttcatactaataatattttaattattaatttatcaacctataatctccgtagtcatttcattgccatcttcatccaatattttaggttcttggctatccagccaatgttgaaattttaacgttaacctacgcacttttcccaaatcatctaaattcaactcagactcaccggttaccttcataaaaagttcgtatttttttcgagaatattcacctagataacgatattttataggattatctaaccaccaagatggtttttccgcaatatctgacacttttaacaaacggcttccattcttacctttgtgcgtcaacatcgttccatcttgcactatatctaattttaaatcatattttttatcttgtaatattgggtcattttttaacgcaatataaattgtatctttcacttgccctttaccaaatataaactgattcggcaagctataaagattttctggtaaattacttttttctttatctacaaccactttaaatggagtatctttttctaataattgaccggtcaaacctacctctaatggatattgaatttcatcttccaagtaaaagaaaaaagaaacgctaatagaatccgaaggactgatttcatcagatgaactttttgattcttcttccgtaaaataaacataatgctctccttcccaaatagctatatttttcttgctacatccaatagctatccataccagtaatatataaaataaatatttcataccattagatttttatcattattaaatatcattagattccggaatcggaaatacaaacttactgccaaactcaatctttgtttttgaatccctaattgcatccagacccaaacgtttataaaagaaaaaaagctgtccttcaccataaaattcacgtctgaaatcttttaatattagttcattaaacttagcttgtgttcctactgaaggagatgcatttctacaccctctagatgaacgaatataatctagccattgtattgctttcttctcttctttttcataataacattctgctaaaatatagcacatttctgacattcgaatcattggaatcatagcattacatgcttttgcttttcgaatccccgcatctatttttttatatttaataggaatactgccccctattttattcttattatcagaaatttgttctcgctcatcctttgcatattgataacgcctaatatctcgttcttcatcagaaaaaagagtttcatcatcatataatgataaatatgaattcgttgtattttcttgctcttcatacatcgtaagattattattataaagggcaaatataacatccccatataatttcatatttccatcatctacaatatcatatttgtcattaaattgaaaccaactataataatccaagacatctgaagcccactttaaagcctccgctttatcctccttatataaagccacacgagccaacaagcctttaatagcatagtgatgcagacgatatcctcggttttgccaaaaacttgacaaagcacctaaatttgacaactccaaacgataagagttttgactaatgctatttgaatacaatgtatcataactcatagtcaaagtatgtgcatccaacaaatctttgtatactttatccaaatattcattagtagatatcgccaaaggaatatgagttgggaaataatctacataagctaaatatttaccagtcgaatctactctaggggctggagcatacattcgcaacaggtcaaaatgcagcattgcgcgcaatgcacgcgcttctccttctatacaacgcctctccatttctcgcattggaaaaatatttgaatctactacaacagtattttgaattaaattattacaatttgcaattgctgtatacattgactcccaaaaagtatcgaaatagggttttacttttatattttcataatccaattccgctccatttatatacccataattcttggttgacgtagaaccgctcatatcataatattgtgcaagaacatctaaaaatccccaagtcaactcttttccataaagttcagcactcgccattgatttatagataccattcaactgattataaaaaccttcagccttactatactgctgctcctcactcacttgatcaaaaggctccacattcagccaattactacaagaagtaagtagccaaagtcctaacaaccaactatattttaatatttttttcataacatccctgtttaaaaattaaccatcaatgtaaaattaaagtttttggcaaacggatagcctaaacctctttcctgtttcacagaacaacaacggaacagttctcctgtattagcttccaaacgcaatctgtcaacatgcaaagctttcgcaattttttcactaaactcatattgcaaagtcaatgaactcatagaaagcaaattgtatttctgcataaaacgagaggttgcacgagttgtcttagacatatccttgatatcttttaacggagctacatcgcccggcttctgccaacgctgtgtcaaaactctacggtcaacatttgaatattcgatatctgcattctctacataatttaccaaagtctcattataacgatctgctccgaattcatattggaatacagaagacaatgtcaaatttttccaacgtaaattgaatccgaatgaaccttgacctttaggttgtatatctcctattattgtttgttgactggcttcataattataagtcacattaccggcacgatccacaaatacctctttaccatttgccgggtctatccccaatgatttcatcccatacaatgcagttgttgaaccaccctcttcatatttggtgtatacttctgcatattcaggattactagaattaaatcctgaatcataattttcatatttttcatttactcggtcattgtaacgcttcattgaatctgctattttcaataatacctctttatttttagcaaagttagcatgtacagccaaaaaccagtcttcacgattcaatacattagcatacagagaaagctcgactccacgattacgaatctttccaatattgtctttataagtcataaaaccggaagaagaaggtactgtaacatcattaatcatatcgattgtctttttgttatagtaagtcgcagtaaaattgattccatcctgcaacaaagagacatctacagatacatcaaaggtattggtcttttcgcttttcaaatccggattacccatataatatagtttgtttccataaccagtaatgtaccagtcatcatattgcgactgaaaataattatgtgacatgtgaggctcaaaattcacattacccacttgtccgtagctggctctcacctttaaacggctgatcaggtctgattctttcaagaaattataattatggatattcaatcccaaacctcccgaccaataaggagtactctgctgctctttaccgaaaatagaagaaccttcataacggattgacaagtctgccagataaatattgtcaaagctgtagttgaaaataccgttcaaaccggcataacgggatacatgctcggattttgtcggtttatcttgtactttagacgcataattgatatcagccgatgtcccaacagcaaaacccacataatgtgtagatatcgaataggtgctgctctgattaatttcacctataaccgaaaagtttaaattattacgccccaaattggcattataactcaatcctaaacgagtattccatttacttgaatttccatctacagtatacaaatctcctgccaacatatttgtacttgacaatacattggttcctttttttgatttgggatcaataaatcttctatcctccgaccaacttttttgtaaacctacagaagcctgggccataaaacctttacccatatcccaacggatttgcaaattattgacaatctcatctattttatctttttcaaaactattcaaagatgcttcatatagaggattaggatttgcctttgtacctataccccaagctaattcttctaataaatttcctttttcatctctatatttattataaggtaattggtgggtatagtcactaaaatttccataaggtgattcttccgatgtcgtattgttataagttaccgaattgcttaattggaatttacccaaagtaatatatacatcaaaaccggcactcacattattacgcttcgaacccttcatcacaccattatcacctgaataatttaaatcaaagctataacggatattctcattaccactctccacattcaaagaatgacggtgttggaatgcatttcgcaaaggcaaagacatccaatcagtctccacgccctctacatatacaagattatatttatcccaataatctataacatcgagatactcatctcctttatcctctggatcaaaaatacctgccaatttctctgcttccaatttttctttagcatccatcaaattataatcactcaaatccggcacttccaaagttgaagtaaaattgtatgacacacgaacttttcctgactgaggagctttggttgtaatcacaaccactccgtttgccgcacgcgaaccatacatggcagtcgctgctgcatctttcaagatggtaatgttctcgatacggttcgggtccatatcatacaccttctgtatgctcacctcgaaaccgtccatgataaaagtcggggtgttagggttcttttccaaattagatttagaaaatttatccttatccaattgcatagtaccgatactggaatgaccacgaatattgatttccggcaaagcattcgggtctgaaccgaaaatattattctctgcgatacggaaagagggatcgaatgtcgaaattgccttcaatacattggtacgggacactttcatcaactcttcattcttgattgtcttgacgttaccggtaaaggtatttttattaatattggcataaccggttacaaccacttcatccatctggatttggtcgtttttcagcttaatggtcaaaaacttatctgattcgactttcacctcctgagatgtctttccaataaaagagaccaccaatgtttttccgagttctactggaatggtaaatgttccgtccaaatccgtggaagtaccgacagttgtgcctttaatcaaaattgttgcgccaataatcggttctccgttttcatgctccaatactttacctttgataaccaacggttttttctgttgttgcattacctccttacggtctatcatcacaatattgtctttcaccataaaggtcaactgatatccctctaacacatcacgcagtatattttctacactactccgacgtttttccattgacacttttttcatcacactcaaatcttccactctatacgaaatgtatagaggcgaactcagtttgctgtttatcaaactgaaaaattcatcaaaagaaagatttttagcttcaatttctatcacttccttcaacagactcatctgtgcggaagcacaatccggtgcattttgagctttcagcacccactctcccgtcagccaaccggcaaacaaggatacaagaaatgcacataggcacctccttgcaagaactttcactttttgcataaatttaatatttagttagttaggtttgttttaatatactgtcacggtattattttcgtaagtaaagcgcactgcccgcccacgctccaaagctttcaaaatatcttctaagggtaacgtacgaggcaaacgacaatagaaactttctcgcttcaacgattcacggttaaatctaaattccacgccataccaatcagccaatcgtgaagctatctcttccaacgcagcattgcggaagaagaatatattttctttccaggcaaccaatgtttcccaatccacctcttttgctactaaccgtccggattcatccaactgtccctgctgaccgggttttaaccgtatttcttttatatctcccgccttccgcatccctacacttcctttaatcaaggttgttttaggagcttctggcaaatatccgtttacattaaattcagtaccatagacttttgtttccgtactaccaactgatacgataaatggcttgccggcatctttagtaacttcaaaataagcctcgccatactccaaatgaatccgtctctcttgctgaccctcaaaattctccggaaatatcaatcgtgaatttgcattcacatacacccgactactgtcagccaaaatcaatagccaagtctttcctcttggcacatctataacttgcggagcaaccatctctactgcttcctcaacattcagttcctcttctacttctgcaacaagctcttctttgttttccagattataaacttttccgtcagccgttgtcatacgcaccacatcatcgtatatgtccgttgcagcaacttctgtcatcactggcaaactgctttctgattttaaatccaacaacaaccacccactccctaaagcaaggaataacagtgctgcaacgctgctccattttacaatccgtaaacgtttacgctgctgcacagaaaaagaaagcgagcgatacaactgttgcaactctttttctgatactttcggcgaagttccatcaaaatcttttatacgctttgcatactctctatgtacctgagacgtattcaaccactgctcatattctttttcttctgaaactgtcgctgttttatcaaatacctttctgattatatgccaatctatctttttcatcgtaatcgttttcataaaaacacatgagaaaaagatttcatatacacgaaatattgtttttttcaaaaaaaattattcatctttgcagcaactattctaaaatacaaactgaaaatcagaaaaacatgacttcttcctaaagacatgaaaacaacaacaaaaacatttttgaaacctcttctatttataacaattggcagcaatattctgacaattgcttatgcttctatgcctatagaaaagactggatctcagatagaaccggtagccatagacaaaaaatcaggagaatgcagaaataatcccactctccaaattattcattttttattataatgccctttcgcagaaataactgtaacagtgactatttcctctttaatggtataaatcatccgattaaacttgtctattcttctgctccaaaatcccgaaagattaccttttaaagcctcaacttgtcctgttcctgtcatcggatgttcccttaattccaagaacaatctttgtattttaactattgcagcattattccctgatttttttaattctgcaatgtcttgtattgcttttggtcctaattcaatattataagccacatcaaagattattaatgaaattaataatatcctccgtggtacgtaaaactacagcatctgctatttccccttctctatactctcttgcacgttcgtcaacctctgcaagatttattgggtctgtaaagtattcatccccacttggacttggatttagaatctcaagttttaatgaatcagcttttgaaactaaaatatgttcgataaatgcctttaaacttttaccttgtgaagcagccataatagacaacttctgtagtgtttcaattggcaaatcaatatttttcctttttttttgtaacgctactgtagtcataatcttttattgttttctgcaaatatacacaatatatattatatatacaatatacacctatttaacaccactaatattcacatcaatctagataaatctcgaaatgaaataagccagcattaaagaacgcccgaaattctctctgaaaattttatatgctcgggctacatgtgtattgactgtaccctcgctgatattcaattgttgcgctatttcacgatacgattttccttcgcttttcatgcggataatctgctgttgctgtgcggaaagcaaagacatgcaacgctctatctcattggtcagttcattatgttcgtctgcacactctgtattccaactgataatggtttccaccagacgttcctcatgcttgtcgacaatatccttgtgcctcagaaaattcatacaacgacttcgggtagctgtcagcaaatagcccaaaatatttgtatctgccggtaaacttctgccattttcataaaactggataaacacatcctgaacaatatcctttgcctcttcacacatcacataatggtatgcaaaacgatacagactttcaaaataagtcatgtatagttcttcaaatctatatttatcctgaacaatagaaaatttcattttgcaatattgtttgaggcattcccacttattgtaatccaccaaacaaaattatcaattttttgttttatccaaacaaacttctgcacaaatctgctatcttcgatacaaaacacacctctattgcatcgtttttacgggtatatccttttttattacccaaaggtacaaatattcgtctgaagcccagtttacccgcttctgcaatacgctgttcaatgcggctcactgcacgaatttctccggaaagtcccacctcaccggcaaaaaccgtatcaccgggaagagccgaatctatatttgatgataaaatagccatcaccactgccaaatccaaggcaggatcactgacgcggattcctcccgctatattcaaaaagacatctttggaagccaaacggaatcccactcttttttccagtaccgccaacagcatgttcaaacgccgcgaatcaaagcccgtagcggacctctgcggcactccgtatgccgctgtggataccaatgcctgcacctccaacaaaatcggccgtacgccctctatcgtggctgaaacggcaatcccactcaactcttccgcatgattcgaaagcaataattcggaaggattgctcacctgcctgagtccgctttgcaacatttcataaattccgatttccgatgtcgagccgaaacggttttttatggaacgcaaaatccgatacatatattgctggtctccttcaaattgcaagacggtatcaaccatgtgttccagaatcttcggtcctgccagttgaccgtctttcgtgatgtgcccgatcaatatagtggatatcgtattctctttactgaaacgcaacaaggcattcgtacactccctgatttgtgacaggcttcccggaatggaatctatagtctctgtagccagggtctggatagaatcgataatcaacaaatccggctgtatcgcccgggcatgctccaacaccatttccagagaattacccgacaaaaacagacaatcgtcattatccgtacccaaacgctgcgccctcatttttatctgcgagatactctcctcgcccgatacgtacaacacccgtccgcaacggctgtgcaaggcaaattgcaagaccagtgtcgattttccgatacccggttctcctcccaacaatatcatggaacccggcaccataccacctcccaacacccgattcaattccccgtcaccggtatccatccggacatctgcattcacctttatttcagacagtttcaaagccttggacgaaggagtaccgataacggcattccccctccctttcgtctgtacctccacctcttccacaaaactgttccattccccgcagacattacagcgtccggtccattttgcctcttttgctccgcaattctgacatacaaaaactgtcttcgtcttagccatgatcaacctgtttagaaaaactcttcctcttcttcctgcactttacgcccgtcattgccctcatcacaatccaaccgtttggtaatacctgccggcatctcaaatgcactttgcttcaaacccagtttcgggtcggcataagccttctgcaagaatttagcccagataggcaacgccatattggctccctgaccattagccagattctggaaatgaatggaacgatcctctgctccaacccatacaccgcctaccagttccggtgtcactcccataaaccatccgtcagcatgagcctgtgtcgtaccggtctttccgcccatcggattcatcagcttatatttatatctcaatctgacaccggtaccgccctgcaccacaccttccagcaaattacacatcagatatgctgtattttcagttatcacttcccttgaatcggcttgaaattcctccagtacattgccatatttatcttcaatacggtaaatcggtagcggagtattatatacacctttattggcaaaaatcgaataggctgccaccatctctctgactgaaatttccgcagttccaaggaaaatagaaggcaccggatcaataaaactcgttatacccattttatgtgccatctgggcaactgcctgaggtgtaaactgtttcaaaacccaacccgatatattgttctcagaattcgccaatccccatctcaaagtgaccatttcacccttacgcttcgaacctccccgggctgtccataatttaccatccggcaaaaggaatgtctgcggaatattaggcactttatcacagggtcccaatccctcctgcattgccagcgtgtaaagaatcggtttgatggtagaacctacctgacgcttgcctgaacttaccatatcatacataaaataacggtaatccggtcctccgacgtatgccttgatatgtccgtttttaggattcatcaccataaatccggaacggaaaaatgccttataatgcttgatggaatccatcggcgacatcagcgtatcccgcaaaccgttccaagtaaacacctgcatgttcactttctgattaaacattttacggatatcagcttccttcaaaccctcctttcgtgccacccgataacgctccgactgcttcatcgaacgggtaagcacctgattgatctgctccatagtcatatcatttgaaaagagcgaattacgcttatgcacccgctccttgtcaaacagaggctgcaaatccttggacaaatgctcccgtaccgcctcctctgcatattgttgcatccgaggatccagcgttgtataaatcttcaagccatcggcatacaaatcataatgagtaccatccactttcacattcttcttacaccatccatacaacggattggtctcccatgccatggaatccactctatactgcgccaagtcatgataatgagccttttccggcatacttgctgtcataaaaagacgcagatgctcacggaaataggtcgcccatccctctttatggtcaacacgcttgaaattcaatcccaaaggcaattgtttcaacgaatccatctcctctctggtcaacttgtcatatttatacatctgcgacaacaccacatttcgccgttccaacgtcagttgggggcgtcttacaggattaaaataagatgaattcttagccattcccaccaacatggcggcctgctccacccgcaaagagtctaaaggtgtctgaaaataaatatcggcagccgaactgattcccaccgccaggttcagaaaatcgtatttattcaaatacatggtaaggatttcctccttcgtataacttttttccaacttgacagcaatcacccactccctgaatttacggatgactaattcaaaagcattcaaatccggctcacgcgggaacaacatctttgccaactgctgggaaatggtactaccgccccccgtcgatgacgtatttccggtcaacaccccttttaatacacggaacaatcctctgacatctattccgctatgctcgtaaaaacgggcatcttccgtagcaatcagagcatctattactgattgaggaatctcccgatactctgtatatttccggttctctttctcaaaataccggcccataaaagtacggtcggcaaaatagacttccgaggcaaagcggttattgggattctccaattcttcgaacgtaggcataaagcctaattttccggaagaaatcagccaaaagaaaatcactacccccagaataccaaccaaaactaccgaccaaaatattacaagaaatttccaatacttcttaaacataagacaagcatattaatttaaggagcaaaagtaatgataaataatgatgattacaattctaatttcaattcctcatacaagtccacaggacctaaatgccaatattttgtgctttcagaggacagtcctaattcataaagagtaatttcataaatcattcatatcccagtaaaatccgccttccatctataacaactccatatcaaattcaagaaataaattattgataacctatataaatactattaaaaccctataaacatagcattcatatagcatttatataggatttatatagcattcatcttggttattgtatagatttgacatggatttgacatagataagtatgagctggctgaaaacggtaaatattccgtacaatagcactgattaaaaaaagaaatttctatttttgcagtaaattgacttttaatggatatatatgagaaacaagactaaacgactattgaccattcgcaaactgatagaatccgagttgatttcttcacaggaagagttgcttttccgtctgaaagaaatggatgttgaagcgacacaaagcacattgtcccgagacctgaaattcatgaaagtggcaaaaatcccgcataaggaaaaaggatatatctatgtcattccggaaagtatccaaaacgaacagcgcgaagaaaaagtgtcggctatcattacggatactatcctgagtattgatttttcaggcaatatggcagttatcaaaacactgcccggatatgccaatgccgttaccgtattgattgacagtgaaaattattttgaaatactgggcaccattgccggagatgatacaatttttattgtcatgcgcgaaggggtaagccgcacagaacttatagatgctctgatgtctgttcatcccgctatacatacattatataaataaaaacaaaagactgctttttattctcaattataagtaatacatttgcaccccgtatttcattaaaatgtcatgcaagttttaaacactaaaaatgaactgattagtctgattagtggcctgaaaaatgaaggcaaggtaatcggatttgtccctactatgggggctttgcacgaaggacacttgtccctggttaaggaatctaagaagaatagtgacgttacagtggtcagtatattcgtaaatcctactcaattcaatgatccggaagatttaaaaagatatccgcgcactttggataaagatgtggaattattgaaaacagtaggttgcgatattgtatttgcaccttcagtagttgaaatttatccggaaccggatacccgtaaatttgacttcggctacattgaaagcgtgatggaaggtgctaaacgccccggtcacttcaatggagtaggacaggtggtaagccgattgtttgatattgtacgtccggataaagcattctttggaatgaaggatttccagcagattgccatcatccgaagcatggtgaaacaattgaaatatgccgttgaaattgtaccttgcccgattatccgtgaagaaagcggattggcacgcagttctcgcaacactcttttggatgaagagcacaaaaagaacgctccgcatatctatgctactttgaaaaaagccacttcattggttgcagaaaaaagtgtagaagagatgaaaaaatggattgcagacgagattaacagtaatccttttcttgaaacagaatacgttgaaatcgttgatgaagaaacactgcaaattacaaaagactggaacgaacccggcagaaaagtggcttgcgttgcagtttatgcaggtaaaatcagattgattgataacattgtattttaaacgaaatgaatatagaggttgtaaaatcaaagattcacaaggtaactgttacagaagccaatctacaatatgtaggaagtattacgattgacattgccttgatggaagccgccaatatcatcgaaaacgaaaaagtgcaaatcgttaatgtaaataatggcgagaggctggaaacatacgttatcaaaggggagagaggttccggtgttgtctgtctgaacggaccggctgccagaaaatgtgcagtgggagatgttgtaattatcatatcatacgcatccatggatttcgaagaagcaaaacagcataagcctacacttgtatttccggatacaagcaccaaccaattgatataagtagaaatttggaaattataacgtaaacgatggacgattgtccatcgttttttttatccaatattattaaaaacccttgttaataagttgcgaataggctgttgaaaactattaatagaaaatgaaaactttatttggaatattggataaaacaatccattcgatttttctgacaaactaccaaaaaaatagaacagatttattcgattttattctgactacttactaacagttttcaacactaaaattctcaattattttttcagtgcgaagattactgacagttgttaataaagtctattctcaacttattttcaaacaattacaatttaatgacgctgttaataagctttggttacgatattaataacatgaaaaacaactttttctatcaacatttatcaagagaactaacagcctataataaccttcatattttttttaaagaataaattagaatataataatgaaatattgaatgttgaaaatgttgatttgagtaattttgctgcgaaggtttgaaactttctaaagattatccttcgccggataaataaaaagtagtaagtttgaaagcttatattgtatattatataaagtagttgatttatgaaagtaaaaatagtaaaccgttcaacacatgctcttcctgagtataaaactaaggcttcggcaggtatggatatccgtgcgaatttagaacaaacagtcgttttaaaaccgttggaacgtatactaataccgacaggactatatatagaattaccggtcggatatgaggctcaaattcgtccaagaagcggattggctttaaacgaaggtttgggaatactgaacagtccgggaacaattgatgcagattatcgaggagaaataggtgtaattgtagtgaatttgtcaaataatgtgattcagattgaaaatggtgagaggatttgccaaatggtgattaatcgggttgaacaggctgaatgggtggaagtggagacattggatgaatcggaaaggggagagggtggattcggacatacagggaaaaattaaaatgtttaaagatctgtatatgaaaaaatggattttattattattggctgtttttatctgtacagccggttttgcagaccggaaaaagaaaaataccacacctgagcaaattttgagtgaagaacggcaagtagaatttgattactgctatatggaaggggtgaggtgtaagataacaggtaattttcaagaagctttgaagtggtttgataattgtcttaaaatattacccggcagcccggcagtgaaatatgaaattgccggtttattgagtatcggtaatgacttgaataatggtttgaagtttgctcgagaggctgtagccggaaatcccggtaatatgtggtataaagtgttattggcaaatattctgcaagaaaaatctatgattgaggaagcttgtcaagtgtatactgaaattattgataagtatccggataaagatgatttttatcttttggaggccggtctttatgcttctgtagaaaaatggcagcaggctatcgaggtgtttgataggtatgaggagcaatttggagttactgaaccggtttccattgaaaaaataaaattatatacaaaactggataacgttaaaaaagcatcggctgaattagtcaaattgatacgcaagtttcccgacagaagtgaatatctaagtttgttggcagaactttattttaattataaccaggataaaaaaggattacagattttggatcgtctgttaaaggccgagccggataacggttttgtgcatttttatctggcagattattacagagggaaaaaattaatagatgaagctgaaaaacatacgaaaagcgctttgttgagtgataaaatagataatggatttaaaatacagtatatcttgaaattgattttagctccggattccatagcaataacggatgctcaaattgattcgtatgtagcgcttttacttgaaaagtataaggaggatttaggtgtacgggctttacattccgatcttttaaaaagggatggaaaattggaggatgcaaaaaaagaattggaatatatattggaacatgaccgtaataactatttaatttgggaagaactcttgttgctatataatgatatgcaagattttagcagtatgtatagtaggagtttggatgcaatacgttattttcctgaacgtcctttgccttatttgatggccggtgtaaagttagtgatggataatcaggtgaagagtgctttaccgttttttgaaaaaggagtgaccctgtctgatgaaaatccggcaatgaaggctcagttttatgctaatttaggtgaatgctattaccaattggatagtgtggagaaagcttttaaaatgtttgatgaaacattgaaaattaatccgaatgatgctttggtattgaataactatgcttattatttagctttgcgaaaagaaaatctcagcatggcagagcagatgattgcgcaagcagtgaaaatggagccggataatgccacctcattggatacatacgcctgggtgctttatgtgaggggaaattactctcaagctaaattttatatgaaattggctatggagaagtcaaaagaggtatcgggagttttatataatcattacggtgatatactttatatgaatggtgaaaaagaggaagctttgaatatgtggaaaaaagctttggaaaccggtatagaggataaagaagaattaaaagttttaaagcagaagatagaaacaggtgttttgcctgaataattgaagtttggatgatatgaaagttagattattattgctgttgatgatttgtttgtcagtattgtcttgtcggacagtgaaacagactgtagtgaaaaaagaggtgcctttgataactgaaaataaattattgaagaatatcgaagaaaatgaattaaaatataatacgttgtttgccaaacgtatagatgcttcattaaaatcagtaaataagagcaatgatttcaggctttcgatgaaaatccaaagagacagttttattcaaatttctgtaaatgctccgttgggcatagaagttgcacgtattttactgactcgggacagtgtgaaatttgtagatatgcataacaagaaatatttcttgtcggattacagctacttttatgaccgttttgagacagaattgaattatgactatattcagaaaatttttaccaatagttttgtgaatattaattttgaaagtaatccggaaaaaacaaaaaaatacaaattgtcacgtgttgatgaaggatacgaactttcaatgattcaagaaaaagcactgggaagaaagataaagaagctttataagaaaaaaagaaagaataaagattttatgttgattcagcaaaaagtaacgatagatcctactactttcaagcctttgagtttctttttagaggatatagaagaggaagccggagtaggagtggagtataagaatttcaaggatttttcaggtaaactatttccggaaaagtttgtctttgatcttttttccgcagaaagtaaaatgaatttgaaacttgaatttcaaaaaatagaatttgatgtacccgtaaaatccaatttcagagtatcttcaaaatacaaacctttgatgttatcggatgaaaaataagattttgatattattgattttagggattttctcttttcatggattgttttcgcaatccatcaatgatgtacgtcgacagaaggagaaagcagaaaaagaaattatttatctgaataaattgttgaaggaggcatctcgtaacaagtcggcttcaactgagaaagtaaaaattttacaagctaaaatcacacaaagtaagaaagtgatttcttctttgaatgcagaagtaaattatttacagggaagtattactaaaaatgaaaatcggatatccgaattggaggaagagcggaaggctttattggatatgtatgcaaaattggtatatggaagttggaaaaaaagaaataaagctgataaattgatgtttatactttcggcttctgatttcaatcaagcttataaccgttttaaatattttcagcaaattcaggattattctgacaagcaattaaagcttatacagcagataaatgattctttaaagataaaaaataaagatttagagcgtttggttggccagaaaaatgaagtagtccgaacaattcatgtaaaaaatcaggaaatggaatcagagcggatgaaagaaaatcaatacatgtctgagttaaaacgcaaagaaaaggatttacggaaaaaattagataaagaaataaagaatcggcagcgtttggctaaagaacttaaccgactgataaccgctcaaacaaaaaaggcatctactactaaaggcaagttgacacaagaacaaaagcttctttcagatgattttgctaaaaacaaaggcaaattgccatggcctgtagcagaaggatttatttctgaaaaatttggagtaagtgtacactctttacataagtatttgaaaatatccaatgacggtatcgatataacaacttcaaaaaattctgatgtatatgtagtttttaaaggggtagttttagatgtctgttatgtaccgggattgaattatacagtattggtgcagcatggtaatttttttaccgtgtatcccaatttattggatgtaaaagtaaaacgcggtgataatgtggcaaccaaacaagttttgggacgtattggttatgatagtgaaaaaggtagtgtattgaactttcaaatttggcagaatgtcggaaaaatacagccaataaagttaaatcctgaactttggttagcaaaataataggctatgaataagttagagattattatatcatcggatatcaataatattatgatggtcgaaagattcattgatggattttcagaacgatttcatgttcctgattatttatcagcccgtgttaatttatcggtaatagaagctgtcaataatgctattttatccggaaataagcgtgatttgaataagaatgtgactttaattgcctctatagaaaataatcgcttgaaagtgacagtaagcgatgaaggtgatggttttgattttaaaaatatacccgatcctacacttccggataatttgggaaagtcagcaggacgcggattatatttgatgaagagcctttcagatgatattgttttttcaaatggcggttctacagtgacaatgttttttaatttataaaataagatggaagaaattttattctataaagaaggaaaagtcgactatccttcttttttttctgatatacgggtttgtaaatggctgaaagttattgccgagcattatcaccggcaattaggtgcattgaattttattttttgtgacgatgattatatattgtcggtaaaccggcagtatttgaatcatgattattatacggatgttattacttttgactattgtgcaggtgatgtactttcgggtgatgtttttatcagtctggatactgtcaaaacgaatgcattagaatttaatacctcgtatgataatgagtttcatcgggtggtatgccactctgtgcttcatttgataggtttcaaagataaaacagagccggacagcatagaaatgcgacagaatgaaaatatttgcttggatcttctaaaatcgttataatatgggtcatttattaccggattatgatgtaattgttgccggtgccggtcatgctggttgtgaagcagccagtgctgctgcacggttgggttcgcgcactttgttggtgacacttgatatgaataaaattgcacaaatgtcatgtaatccggctataggcggtattgcaaaagggcagattgtgcgtgaaatagatgctttgggagggatgacagccattgttacggatcgcagttccatacaattcaggatgttgaatctttcgaaaggacctgccatgtggagtccgagagctcaatgtgacagaatgaaattttctgcaaattggcgggaaattctggagcatacggatggtttggatatgtggcaggatgaagtggtggaggtgattgtggaaaatggcgaggcaaaaggagtccgtacggctttaggagcaacgttttatgcctctaaggtgatacttacaaatggaacatttcttaatggactgatgcatattggaagagtcagttttgaaggaggtagaatcagtgagcctgcttctcatggattgacggagcaacttgcatccattggttttgagacaggacgtatgaagaccggtactccggtcagaattgatgggagaagtatcgatttttcaaaattgactaagcaggagggagatgatgattttcatcgtttttcgtatataaattttgattataccaatcatttggtgcagcgtccctgttatatggcctataccaatgaaaaagttcatgaagcattgcgggagggatttgaggatagtccgatgtttaacggtacgattcaaagtgtaggaccgcgttattgcccaagtattgaaaccaagctcaatacttttgcggataaaaacagtcatcatctttttttagagccggaaggagaaactacaacggaatattatttaaacggtttttcttcttctttgccctgggaggtgcaattgaaaggcttgcgtctgattgagggatttgaaaacgtacgtatttacaggcccggatatgccattgaatacgattattttccaccaactcaattatatcatacattggaaaccaagttagtgaaaaacctttattttgccggtcaaataaatggtacaacgggctatgaagaggcggctgcacaaggtttgatggccggtatcaatgctcatctttcacttcgtgggggagaggaatttatattgaagcgcgatgaagcctatatcggtgtattgattgatgatttagtaacgaaaggggtagatgagccataccgtatgtttacttcacgcgcggagtatcgaatacttttgcggcaagatgatgcagatgtgcgtttgacagagaaagggtatcatttaggtttagttgatttaaatagatataatgtttatttaaataaaattaacaaaagagatttattgatagattacattcgaaactatagtgtgaagccggatgctatcaattcttatttggtatctttaaatacagcaccattgcggcaaggattaaaattggtggatgtattgactaggcctcagataacattagctaatttgataaatgtattgcctccgctggcagaatttgtccaatcaaatgaaatacgtgctgagattgtagaggcagcagagatatttataaaatattccggttatatagaacgcgaacggatgctggctgataaactgactcgtttggaaaatttggttatttccggaaaatttaattatgaagagctgacaaatctctctatagaggcaagacaaaagttggcaaaaatccagccgcgtactatcggacaggcttcgcgcatcagcggagtttcgcctgcagacatcaatgtgttgttgattttgctgggtcgttagcgaagagttgttgtaggtgtttcacgtggaacattcgtacttatttttagaaaagctatgaaaattgaaggtaatatagtcgatgtagaaggacggaaaattttccccggagtgatttctgtcaagaatggaataattgaatctattgtggaaaatgataatttttataatcattttattgctccagggtttatagatgcacatgtgcatattgaaagttcgatgttggttccaacagaattttccaggttggtcgttcgaaaaggtactgtgggggtgattaccgatcctcatgaaattgcgaatgtattgggaaaggatggtatttatttcatgttagaaaatgcaaagaacgcatctgttaagatgttttttacaataccttcttgtgtaccggcaacacctttggattgttctggtggggaaatatcatcgaatgatgttgaagatttatttgatacgggattgtttgtggggttatctgagatgatgaatgttccgggagtattaatgggtgatgtggatgtttgtcgtaaaatagagagtgctcgtaaacgaaatttagtgatagatggtcatgctcccggcttgaaaaatgaggatttgataaaatatattgcagccggtatttctacggatcatgaatgtacgacagaggaggaagctttggaaaaaattgccggtggaatgaagattttaattcgagaggggagtgctgcgaaaaattatgaagctttgaaggggttgataaaaaaatatccgaatgaagtcatgttctgtaccgatgattctcacccggacgatttgatagaatttggacatattgataaaatcgtgaagcgggcagtggcggacggttttgatttgtttgatgttttaaaagctgcttctttgaatgctatccggcattatcatttgaatatcggaacgttgaaaataggggaaaaagctgattttaccgtttttgaaaatttgaaagattttactgtttcgtctgtttatattgatggaatcaagcggtatgataaaaatatgggggaatctgattcttctgttgaatcatttaaagaagttggttttaataaattcgtaagaaaagcgattgagaaaaatgagattgagaaaaaagtttccaatcatattctttgtatagatgtgaaggacggagagattgtaacaggaaaaatagattttcaaatagcaattcatccttttaatctggaatcggatttggaaagagatattttaaaaatagtatatattaaccgttataaaaatgataaacctcaggtggcttatatccatggagtgggtttgaaacggggagcttttgcaaccagtatttctcatgattcacataatctgattgcagtcggttgtagtgatgcggaaattgtagcggcggtgaatgccgttattgataaaaaaggcggactggcaattgtcgatggtgataatatagaggtgatggctttgccgatagcaggaataatgagcgatcaaaggggagagaaagttgctgataggtggaatgaattttgtcgttgtttaaatgatatgggatgcttgctgaattctccttttatgacactttcatttatggctttgattgttattcctgaattaaaaataggggagaagggattgtttgaatattctagttttggttttatatcgtaaatatagataggatggctttgtatgaagatcgcctgcgtgcaaagattaatgagttgccggataagcccggtgtttatcaatatttcgatgcttccggcacgataatttatattggtaaagccaaaaatctaaagaatagagtacagtcttatttaaacaaaagcaatcaatccagtaagacacttttacttgtaaataaaataaatgatttgcggtatattgtggtcaatagtgagcaggatgcgcttttactggaaaataatctgataaagaaatataagcctcgttataatattcttttgaaagatgataaatcgtatccttggatatgtattaaaaaagaaaattttccacgtgtttttgttacacgtaaatatatccataatggttctgaatattttggtccttatacctccggaaaattggcacatacattgatatcattgattaagtctttgtataaattacggacttgcaatctagcgttggagtataagaatatctataacaataaattcaaagtgtgtttggaatatcacattggtaattgtcttggaccttgtattggtaaaattcgtgaagaggagtatggagagtatatttcccaaattcgaaatatattgcgcggtaatttaagtatggttgtagatgcaatgacaagacgaatgactctttatgctgaagaattgaaatttgaagaggcgaatgaggtgaaaaaagctttagacttagtaaagaattatcaggctaaatctacaattgtacggactaccgtgcacgatacggatgtattttcttatattgaaacagaaaaatatggttatgtcaattatttaaaaatagtacatggtgccgttatccaagtccattctgttgaaatagagaagagaatagaagaagaaaaagaatctattcttgcatttgccatttacgaaatacgccaattgatgggtagtgagtctaaagaaataattgtacctttttatcctgacatagaattggagggtattcagtatgtaatacctcaaaaaggggataaaaagcagttattggatttatctgaacgtaatgccgagtattttcgtttagacaaagaacgtcagcgtagtctaaaaaaagaagataattcatttaattcattgagaaccatacaattggaattaaaattaccacatttgccacatcgtatagaatgttttgataattctaatattcagggtaccaatcctgtagctgcctgtactgtatttttagatggtaaaccggctaaaagggagtataggaagtttcatgttaagagtgtggtagggccggatgattttgcttctatggaggaaattatctatagaagatattccagagtattggatgaagggaaggatttaccggatcttattgtggttgacggaggaaaagggcagttgcatgctgctatcaagagtctgcaaaaattggaattatatggcaagattccaattttaggtctagctgagcgtatggaagagatttattttcccggtgataaggatccttatctcttgggaaagaattcggtggcattgaagacactgatgcagattcgggatgaagcccatcgttttggaataacttttcatcgccagttaagagagaaatcacaaaccaagagtgtattaagtgaaatatatgggataggtgaaaatactgaaatagtattattgcagacatttaaatctgttgaaaatatttctgccagaaaactagaagagttggctgctgtaatcggtcaaaagagggcaatgattgtatataattacttccataaaaaaaataacccggatgattccgggttataatatcaggggtgtaagattttattatattcatcctgattggctaatagttctgctgctttcagaatttccttgtcatgttttgatctgtattgaagaaatccttcaaggtagtaataacgttgcaggaattgttcagtcagaaatgaaatgatttcttcccggaaaagattcatgtcacgatctacagaatgttggaattcctgttttagtttttcgatagtttctttggatgtatcgtagtatctttcattttttgctatattaatcagtttgtccaataccttttgagattctgtttcgtagctgaactttatttctttcaggtagtttttaaattcattgtaaatttcatctgtaattttgaattgctcgatgttatctattttttcatggcgtagagcataattgttgatgaaatcaaaagtcaaatcttgtaatactaattcttgcgtaattcttgcatattcttccggttctatttttatatccggattaataccaccgccatcatatactttgcgaccattgagggtgctgtattctgtgataagagaatccgggactttgccgacacttccatcaggatttcggtgagtataatcaagagcttgtatacatcttccacttggaatataatatttggctgttgttacctttaattttgtattgtaggcaagatctcttacattttgaaccaacccctttccaaaggatctttcgccaattaaaacagctctatcgaggtcttggagagctccggaaacaatttctgcagctgaggctgaaccacgatctattaaaacgacaagaggcatatccggcactatgggatttttactcgctacatattctttgtcccactgttttaattttccttttgtgctgacaactttggaatttcgtggtacaaaaaagtttactatttctacagcttggtccatgagacctccactattgccgcgcaagtcgaatactaaggattctgctccattgttttttaattcaatgatagcagttctaacatctgctgctgatttatcggtgaaactagtgagacagacatatcctgttttattgtttatcatgccgtaataggggacacacggtaattgtattttttcacgtatagctttttttatcagcggtttttcatgatattcacgtttgactttgattgtaatttcttttcctggcattcctttaagcatctcgctgacaccggctacatcttttccttttgtagaatgaccatctatttcaagaataatatcacccggtaataatccggctttatctgccggagaatttttataaggttcacgaataatgacctgatcaccttttttacttatgacagaaccaataccggcatattctcctgtagtcattaatttgacatcttcagtttctgattcagggtaatagactgtataaggatccaatgatcgcagcatggcattgattccggtagtaatcattttttccggattcacatcatcaacataaaaaagatttacatctctgaagagtgaagcaaaaatattgaggtttttgctgatttgaaagcttttatcgtcatttttcaaggaggtcaatccaataattatggcaatgacggctacagctaaaataagaattctttttgttttcattctattatattttatctattattacacctagtaggataatcagtaaacgaaaatagtatatattcttgaaaataagaagtaaggatgaaaatttatgtgtttattaagaaagctattttttaaggaaccggatcataaccacttccaccccaaggatggcatcgaagcaatcgctttatagccaaccaggttcctttgataggtccatatttttttattgcttcaacagcatattgcgagcaggtaggagtgtatctgcaagtcggtggttttaggggtgaaatgcagtattggtaaaatttgacaggtatcaggaacaagaaggtgaaaaattttttaagatatagcatattattcctgattaatttctgaactatagcgagctactattttttgtaatatagctttcactgctttttctgttttcgcaaatgtgggtatggtattatccagatatattaaaaggatatctatggttttgccttcttgtatttcgttatagaggattgctttatttaagcggaaagcttcgcgtgccagtctttttacacgattccgttttacagcgcgtttaaatttttttttaccgacactgacggctattctggcagggtgagttccgggaattgatgatattttatatacaacgcggaacggatatttgataaagctcagttcagacgcgagtagctcctctataaggattttactgcataaacgttctgttttactgagggtgtacataggaataaatttgaaaatgtccggaattaatggttccggacatttgtattacttagatttgttttccttattgaaccgtttgatataatcttcaagagccattgtcatagaaggacattgctgagtaggagcttttatatccagacgtaaaccggcttcttcaacagcagttgctgtagcgggtccaaatgctgcaattgctaaagtgtcctgaacaaaatccgggaaattctggaataaagacttaatacccgaaggtgtatagaacgcaacaatatcatattcatgcaagtccttaatatcgctcaagtcgctggcaatggttttataaagtattgccttagtgtatttcagattcagtttatccaacaaacccggaatattttctttatgtatatctgagagtggtactaagaaattttctgttttatgtttcagcagaattttagtcatgtcgtccactttcttgtctccatagaaaatttttctttttctgtagacgatatatttttgcaggtagaatgccgttgcttcagagatacagaagtatttcatggtgtctggtactgttacacgcatctcttgacaaattctgaaaaaatgatcaatagcagttcgactggtaaagatgatacctgtatggtcgaggatattaatcctttcttgtctaaattcttttgccgttacaccttcaacctttatgaaagggcggaactccaattttaatccatacttgtcagctaattccgaatacggtgatttgtctgtagtcggttgtggctgtgacacgagtattttttttatcttcaaagcaataaagttttagtttgttaccttttataccactgctttatataaaaaaagtagtggaaccaattcgagggcacaaaggtacaaaatcatatacaatattgaaactttgtatgagaagaatattgctaaccaacggactattttaactaacattaggatagttaagcagataatggttgttatgataagtggatatacagcgttttcacggacaaaaaagagtgcaataacaaagggtgaaatcagtaatcccagactaatatggaatgtccatagattgacggtaaattcattggcaatttgcttggtactaaaagtccatcccaataggtgaataataaatatcaaaataagatgatagagtaataagcctccaaatatcaaaagactatggattgataaaaaagtctgtgttgtaagataggtgataaaaacagataaaacggagaaagacagggttagtcccatgcagtagaataacaaattgggtaatataccttcattcaagagaggtgttgccttcttcctttgtattgtggcataaatgatatctgtaatcaaatctttacctcttaagcggataacggcaaatatggccagaaaaatgatagtaaagataagattgagagtaagatttttgcctgtatttatcttggaataaggcatagatagagttacaggctggcatatttcaaaagtatctgtcaatagttctggttgctccaataaagagattttctcttgtggccacgagtagtctgtgactgtgttttgaatagagtcagtctgcactttattttgtattttatctggttgatgcataggtattaaattagtgtgcttcataccagttacttccgaatcctgtactgatagttaacggtacagagagtttcactacgtgttccatacaattggtgacgagtgttttcaataagtattgttcggatttatgacatttgaaattcaattcgtcatgtacctgtaggatcatgcgtgattggagtccttcttcctgaatgcgtctgtgaatggaaatcatcgccattttaatgatatctgctgcagaaccttgaatcggtgcgttaatggcatttctttcagccataccgcgtacaacggcattccgtgaattaatgtctcgcaggtagcgccgtctgcccatgatggtttcgacatattcttttttgcgtgctatttcaacagcttcttccatgtatttcttcactccaggatagagttcgaaataaccgtcaatcagttcttttccttcttttcgactgatatgtagtctttctgcaagtccccatgcagaaataccataaataataccgaaattggctgtttttgcacgacggcgcatttccggagtaacatcttcgagagctacatgatatatttttgaagctgtagctgtatgtacatcaatatcgtgattgaaggcattgattaattctttgtcttgactgagatgtgccatcagacgaagttctacctgtgaatagtcggcagagaagaaaacatagtcgtcatcgcctgtaacaaaagctttacggatttttcgaccatcttctgtgcgtatgggaatattctgcagattaggatttaagctgctaagtcttccagtggctgcttctgcctgattgaaatgtgtatgtatttttccagagcctttatctataaaagtaggaagagcttcagcataagtgctgagtaattttttgagtcctcgatagtcaagaattttaccaataatcggatgttcgtcttctaacttagccagaacctgttctgacgtgctatattgtcctgattttgtttttttatgattatggtctatttccaatttttcaaaaagaatttctcccaattgttttggagagcttacattgaaagactgacctgccaattcgaatatttctttttctaccatattgcagcgttctctcagctcgtcagcaatttcctgcaacttttgagtatcgatactgaccccttcatattccatatcggctaatacaaaaacaagcggcatttccacttcgttgtaaagtttccataagcctgttttttcgagttcttcttgtaatttttcctttaattggaaaataacatccgttttctcgcagtaatcattgtcttcagcaacctcttcatcaaactggagagtcagttgttggttttcttgcttttcgtttgataatttgtaattcagatattccaatgccatccggcttaaatcatgggacatatccggttgtaacagataatgtgcgatttttacatcaaatatctgattttttacttcgatacctgcgcgttttagccaaataacatcatttttggcatcaatggaaatgagttttttttctctattttcaaataaaggcttaaagcgtaaaatgatatcaacagctgtttcgtctgtcggtaaatttatataaccgaccgtgtgtttttgaatagaaaaagcaagcgatacaggtcgggaattatataaagttccttcttcaaaggaggcaaaaagcgcaaatgtatcggcattgtctaatttttccaatagggcaggaatattctgattaaagtcttgatattcaacttttatatctgtcaatttttctatatgttcttcttgatgttctgcgtttaatattctccgagacaatgaaaaaagctctaattctttgaaaagcggttccaatatctctgtttttatttgctgtttttccaaattgtcagtggatatatctgtaggtacttcagtacagatagtcaccaatgtacgggaaagttgtacagtagattggcaggtcaacaaattttctttttgtttgcctttcagttcatcgatgtgcgcatatataccatcaatatctccatatttatatacgagggatgatgcacttttgggacctattccggcgcatcccggaacattgtcggcagtgtcgcccattaatcctaatatatcaatgacctgatcaactcgttcgataccgaaatgatcgagtacttcaggaattccccatacttcagatttattgccggatcgtcccggtttatacatgaaaaccttgtcgctgaccaattgtgcatagtctttatccggtgtaatcatgtagaccgtatatccttctttttctgctttttttgctaaagtgccgataacatcatctgcctcgtaacccggtacgtctatgcaggaaatacccatcccctggataatctgtttgatgtagggtacagattttttcaagtcttcaggcatgggaggacgctgggctttataagcttcatacatttcatgcctgaaagtaggaccgtccggatcgaaaataacagcaatatgagtcggtttttccagttcaagtaattccagcaagaaattggcaaaaccgaaggttgctgatgtattaatccctgtagttgtaatccgaggattattgataaaggcataatatgagcgatatatcaaagcatatgcatcaagtaaaaatagcgttttgttatcagacatggctttcatttgaaaattatgtctgcaaagatacacctatttcggaaaaatattctaactatgcaagttgaaattgaaaggatatcggaatatgaaactggagttgcagaaagttgaagactggggtttatttgaaaatatagcacgtccgctggtgattgcaggtccgtgtagtgcggagaatgaggagcaggtgtttcagacagcttatgatttgaagagcagaggaatcaatgtattgcgggcagggctttggaaacctcgcacacggcccaattgttttgaaggagttggggagattggattaccctggcttttgcgtgtgcgtaaagagttgggtatgaaaatttcaacagaggttgccaatattcaccatgtacacgaagctttaaaagccagaatagatatgttgtggataggtgcgcgtacatcagccaatccttttgcaatgcaggaaatagcagatgctttgaaaggtacagatattccggtattggtaaagaatccggtaaacccggatgttgagctttggataggggctttggagcggctgaatatggcaggattgaagaagctgggagtgattcatcgaggtttttcagcttatggaaaacataaatatcggaatgtaccgcagtggcagttgcctattgaaatcaggcggcgttatccggaaatactgatgttgtgtgatccgagtcacattgcggggaaacgtatgtatgtgccggaaatagctcagcaagctatggatttagggtttgacggactgattatagaatcgcatatttgtccggatgcagctttgagtgatgctgcccagcaattgacacctgaaagtgtcggtgaaatgttaggggagttggtgatacgtcatgctcatacagaaaatattcaataccgcgaaagtatagatgaattgcgagcccgtattgatgttatagatagtgaattgttggatttattggcacttcggatgaaggtgtctgatgaaatcggtcaatataaaaagcagaataatatcactatattacaagctggacgttgggaaaaaatattacaaaaggtttttgcctatggagataaacaaggtttggattcggaatttttagagaaaatattcaaagcgattcatcaagcttcgattgaccgtcagaccagtattatgcaggtgaaaaaaaatgaatgccctacagattagctgcagggcgtgtttatttttatcaaatattcaatccaaatcctatcgtataaacatttaaatctgtcagatttttatctttgaaaaggttggtaatagtatagccgccccatatactgattttgctataaccgatacgtgctatggcatccactttgaatggcacgacattgaaatttcctttttgtttttgcttttctattttgtggtttgtgttgtggtagacaactttggtttttgaatgcattcttacaccgcccataaagcctccggatacatagaaccgtttgcttgcatacttggaagcaggaaattgtacttcaagcatcaatgggatagttagatagaggtttttgaagctactgcgtttaacactttcaatatcactatatctctctttggcgttgacaagagatgttgtcccgtctatttttgcaagggtataatcagaattatcaagtctgaaacgttggtattcaagtcctagtcctgtgatgagtccaatgttatttcgtttgtttaaaccgatattatgattgaaaatattgaattgaaaagtgaatgagccggagcctttcagtttcattccgtcatacatttccggcaaatgggcaaaattcataaaacctacatgaaaaccacgggaatgtcctttgaaaggggtataatcttcttggtatgtttttttgcctatgacaaaaagttccgatacactgagggcatttttttgttcggttgtatctctatttttcagctgagtttgagaaaaaaccgttgatgcaattaaaaggcataggaatgataaaatagtcttcatgtctctttatgttttgtatttaataatctcagttgtttgaatcattttttgaagttttgtcttcagtttcaaaagtaaaagaattgaagaatatctcccgctgtttcaacaaggtttctgtatagcggttgagtcctccgatagaaatttggtagatgtagttatctctaaatataaatctcttaaaataagtcatttcgtgtttatccttgatgatggaatattcaatttctttgataagcatattctcataaggtacagtggtttcatttttcaagatagctgtttctatacttaaggttccggcttttaattcttcataaagagcttgtgcaatatcatttgtcatttttatttttttgacagaaaagtcagagcagacaactcctgctacacagacaagatcttttgtttggtaaatagttgatggaatgccgtttatttcctgtttcaatttttgtggtgtattgggaaataaaaaagatacatgttcggaagtattgacacgtatccatttcccgtcggaagcgagaaaacttaaagcaatgaggagaattttcaatatcagcatttttctgtatttttgccgtaaatttaaggcatttgtgccaaagagacgaatattggagtttaaattatctgaataaataaatttatgaaaattgcaggcgtagaagtgggagagcgtcctttgatattggcgccgatggaagatgtgaccaatcctccgtttaggaagttctgtaagaaatatggtgcagactggctttattccgagttcgtttcggcagatgctttggttcgttcggtaaacaagtctgtcaagaaattgactattgatgagcacgagcgtcctgtaactattcagatttatggtcgttatattgattcaatggtagaagcggccaaaattgtcgaagaggtaaaaccggatttcatagacataaatttcggttgtcctgtaaagcgggtagcgcagaaaggagccggagccggattattaagagatatacctttgatggtagagatggcaaagagtgttgtggaagccgtccatttgcctgtaacggctaaaacgcgtttaggttgggattgtgaaaatattatcattgaagatatagcagagcgtctgcaggatgtcgggatacaggctttggcaatccatggacgtacgcggtcgcaaatgtatacaggcgaagcggattgggagccgataggaagggtaaagaataatccgcgcattaaaataccgattttgggtaatggagatattacttcaccggagcgtgctaaagaagcttttgagcgctatggagtggacggagtgatgattgggagagcaacgataggccgtccgtggatattcagacaaatcaagcattattttgaaacgggagagcttatgccagacctttctgtgcgagagcagatagagattataaaagaacagattatgctttcggtagagtggattgatgaagtgcgtggtttattgcatatgcgccggcatatggctgcaatgtttaagggtttgccgcatttcagggatttgcgtatccgtatgttgcaagcgccttctattgaagagctttggcaggtatttgatgagatagaggctcgttatggggattcgttgtagacgaatgtaatcattgtctttctgttattattcgtaacactttcatttagctggaaaagagatattttttgcaaaaaaagtcgtgattgctatttttttttctaaaagttgtcacacaaaatgattactcaaacgttttaattggtgaaatttaaaaccaattttacaaacttatggaaaaagaaagaataggaatacctctgccaggatttaggaggaggtattgtagctttaaaaaagcgacttattttttggcattgtttattgttttcaatttagaattgcttgcaaatgggagcatgcagcatcaaaagattactttaaacttgaaaaatgccaatttagaggaattgatagcagctgtaaaaagccaatgcgatgtcggattcatttatgactattctaaaacaaaaaaattgtcaggaattactgtgtcagtacaaaatgaaaatttggacaaggctttgaatatggcattgcaaggttccggattctatgcagaaatcgaggaaaatacgattatcgtaagagcagtgcaggcgcaaaagcaaagtgttcaggggcaaaaggtaagaggtaaggttatcgataaaaaaggagatccattacctggtgtgactgtcgttatcaaaggtactactttaggaagtgtaactgaccctaacggtcgatttgatttgacattgccggaccctgttggaaaaacgttattgttttcttttgtcggaatgaaaacggaagaggtcttgattaaaaaagtagatgagccgattgaagtgacaatggaggaaaatgcggaaagtttgaatgaagttgttgttacaggtatttattctcgagataagaatagtttcactggttctgccaatacttatactgccgatgatttaaagatgattggtactgccaatatcattcagagcttgaagactttggatcctgccatgatggtgatggaaagcaagcaattcggttcagaccctaatagaatgccgactattgaaattcgtggtaaaacgagtattgccgggttgagtacagaatacgaaaacgatccgaatcagcctttgtttatattggatggtgttgaaacaaccttgtctgtaatcatgaacttgaacatggatcgtgtagccagtgtgacaatcctgaaggatgctgcttctacagctatttatggttcaaaggctgccaacggagtggtagttgttgagaccaaagctccggaagccggtcagttgcgagtatcatataatggtaattttggaattcaatttgccgatttgacagattataatttgatgaattcggcagaaaagctggagtttgaaagattgacaggtcgctatgatcctgttggtttggatatacattggggttctgtagctattaataatcaggattattttaaacgttataaggaaatattgagaggggttgatacttattggttgagcgaacctttgcgtacggtgttcaatcacagacacaatctatatattgatggtggagacgaggcaatgcgttacggtttgggagtaagctataacaataacaatggtgtgatgaaaggttcggacagaggaggagtttccatgaatgtcgatttgatttatagacggaaaattcttttattttctaataaagtgtctttggatatcttgaactctagtcgtgaacctgttgctttttcagagtttgcgaaagcgaatccatattatagaaagacattgcctgatggtaccattccaatgtatttggaagaaggagaagaattaggagatgaagatgttgtaaatccgttgtattcatggcatatcaagaatacaaatgatactaaagatttgcagttgagggataatttcaatgcagagtggactccattttcttctttgcgtttacgtgcccgaataggtatcaccaagggtgttactaaaacagagacctttaaatcaccgaggcatccggactttttggaaacggaaaaattaaagaaaggttcttttgctcaaactcataacgaaactttctcgtacgatggaagtgtagacattatctttggtaagatatttaataatacccatcagttgaactttgtcggcggttggtcttttaatgaaaataaaaatgaatcatctggctatagagttgttggttttaatgatgattttcatacaaatccgtctttttctaccggttttcaggaaaatcaaaagcctgattatagcaaatccagcagacgtgcaacaagtttttacatgaatatgaactattcctataaaaaccggtatttgatggactttaacctgcgggcagacggagcttcagctttcggagcaaacaaactgttttctaccacatgggctgtcggtttggcatggaatatccataatgagtcttttataaagaacttgggatttatcaataatttgaaagtccgtgcttctatcggtaatcccggtaatcagaattttgatgcttatatagcccaaaagacttatttgtataatgtagagttgcagaatatgtttggttccagtgcactaattgataaattcggtaataagaatttggaatggcagcgtaccttggataaaaatatcggtgtagacgtgacattctgggacaaccgtatccgtggaagttatgattatttctttaaagatacagacccaatgttgatatctattaatgtagcaccttcaacgggaaccaattccatttattcaaatatgggtcggcagatttcaagaggttatacagcatctttgagtgttgtcgtgttgaaaaagaaagatttgtcttggagtattaatgtgaatgcccgccatacacgcacgaaatataaagatgttggagaccaccttgataaattaaatcaaataggtagttctactgttttgaatcgttattatgaaaatgccagtccggatgatttgtgggctgttcgttcgttaggtattgatccagcaaccggtcgggaagtgtttttgaaaaaagatggaacacagacgttcaaatattctgcttcggacgaagtggttgtaggttgtacagtgccggatgtagaaggcgttgtcggtacatctttctactacaagggtttttctgcttctttgaatttccgttatcgttttggtgcccagactatggctacggctttatacaaaaaagtagagaatatcaagaaaacggatttgaacattaatcaagataagcgtgctctgcatgaccgttggaaaaagccgggcgataaagccaagtttaaatccattaccgatttgacttccacaccgatttcttcacgatttatcgttacggagaatactttttccggtgagtcaatcactttgggatatgagacaaccgcttcctggttaagatatgcaggtatggaaggcttgacaatccgggcatatatgaatgatattttcagaatatcttcttttaaagaggagcggggaattgattatccgtttgctcgtacgataacattttcattaggtataagattttaaatataagagttatgaagattatgtcaaaaataaaaagtctgttgcttgttttggtctgcttctgcatgctgtcttgcgagagctggctgcaagtgaaatcggaggatagaatcatggaaaataacctttatggtaatcaagatggatttatgacagcactgaatggtatttatattgatttgatgaatcaaagtttgtatggacaggctttatttaatccttttgatattatggcacagtgttacagttgccgtcaggatgaacatgcgtatcgtggtttggcaacttatgatcccggtgcaagacaaaatgcagcggttaccagttggagtcgagcttattttttgcttgccaacatcaataccttgttggaacattgtgaaagcgatcgtggagtattgaatgaccaatattatcatgtaataaaaggagaggcattggctttgcgtgccatgttgcattttgaactgtttagaatatacggacctatttatagtgaagataaagaagtggattgcattccgtatgccacctcgtcagaacctgtaatgactgatatattaaaggcaaatgttgtgatagaaaaaatcacgaatgatttgactgaagccgaaaaacttttagaggggtatgatccggtgattacagaaggtcctctttttagtgatgaggagggtggtgcatctaatgctatgcgttatagacaagttcgtttgaattattatgctgtcttaggattgacagccagagctgctttgtattttggggataaagagaaagcctttaattatgcttccaaagtcatcaaagaagcacaggaagataatgcatggtttccttttgttactcgtgaagctgcaacatctcctgatgtgatggatcgtatatacatgactgaaatattgtttggaatgtacaatttgcagcgtacgcagcgttattatgatgcggttttcagtaatagcttgggagagactactgtgttgagggttgattctgatatacaaaaaaatgtttatgaggaggatgtgaatgattaccgtaacgctttttggtatcaggatatggtagatcctgataataatgaaactcgccattttataaaatataaaggagaagatagagtagatgccggagaggatagtccggatcatttttatatggtaccgcttattcgtatttcagaaatgtattatatagcggcagaatgttgttcggatccggtgaaagcacgggaatacctgaatacggtacgtaatgctagaaacattcccaatattcctgataaagcagaattgatgccttatatcgagaaggagtatcgcaaggaatttataggtgaaggtcaattgttctggttttataaacgtttgaataaaaaggaaataccttcaggtacaaaagttggagagatgataccgatggagaaaagttattatttgttcaatattcctcaaagtgaaatggatttcagaggagaaaaaaagtaaaatagagagttatgaaaagaatttatttaatcataggatttatgttttcacttttgctgttttggcgttgtgaaaaggaaatgatggattatgaaggaaaaccgggtatttattttgcagttcagactgtgcctcccagtcattatggagatcctgatttatgggcttatacagatacaacgttagtacctttctctattatacttacagatgatagtactgtaaatgttaaagtgagagtaatgggggatattgttgattatgacaggcaatttaaaattcatatggtagatacctcaactgatgccgttgtcggggaagattttgatgtattggaaacagagtatgtgattaaagctggagaaagggagactttgatttcaattaccgggcacaggcaggctaagatgttggatactatttattatttgacattggaattggaagaaaacgagcattttgctctgcctttgaaatattggcttcctattgataatgattatacggataaaaatgaagtgattgatgtagtgcgtcacgtaattggttttacagatggtttatatcagcctaaggcatggacttataattatttagggaagtatacaaggaagaaaatgaatttgctttgtagtatgtttgggttgcagccaacggattttgatgatacaaatgagatgacagcaacgagagaacgggcattggcacaaagtctagatcgttatttaaaagaaatggatgctaaaggggaaactgtttatgaagacgaggtggacgaagacgggaagccggtaaagatgactgtgggtccgttgatttagtaatttgtaaaagagaatattatgagaacaatattatatgtgattctgttgcttgtgttgggcaattggatgttaagcagttgttataaggatgagggaaattatgattaccatgaaataaatgaagtaacaattggagataagggatttgttgatacgacttataatgtgacagcttttgtggataccatttcgataaagccagaaattacttttaagttagaagacaataaaaatttaatctatgaatggaaattgatatcggctaatattggaaatcgtaaagaatatgatttgggaaatagccatgaattgttttttcctgtggaattgacagctggcaattatagcttatactttaaaataactgatacggttaataccgtagagtatttaaaaatgactagtgttgttgttcaaaatattcaatcttccggatggattgtattgggtgagaatgacgaaggttttattcaaatggatatggtatctactgtaaatgatactattgtattaaagaatattttgaaagatagtggtttaccaccattgaaaaaaccggtatatctttgggtgattgataattatagcaaaaacatgacccatgtatcaacggaagatggaacttatagaattggtagagaagattttgtaggaggagagaatactcattatcgatatgcattttatgatccaacggttgttgatgaatttgtgttaaaagatgggatacaagtaagaggttatcagcggatagctgttgtcgggaatgatttatttcatataggttctttgatttcaggggaaatttttgggcaaccggcaaatcattataagggtaattatgacttttttgctattggtgataaaatcggtgcgaattttaaatctagggctcagagttttgtagtttataatgatacagacaagcgcttttgtaaaataggaggtacaggcatgggagctactgacgggtattgtgattccttatcggatacgaaaacggatgctgctttattttcttggaagacaggattggactatgttacaactattaatagtttctttttaaatggtcatacttatacaattttgaaagatgcagaaaacagtaaatattatttgtacagttattgtattgataaaccttattggggaacaggtaattcttttaggaaacaaggaaaatatgaacttgtgaattgtcctgaatttgagaatgcccgtttttttggagcgagtgctttgaggacgttcttgatttatgcaaccgattctaaattgtatgcatacgattttcaatcaggtaaatccaaactaataaaagattttggtactcatgaaattacttgtatgtattatgatttgattttggaaacaagagctgattgtttttatatagctagttatgacccatctttaccggcttcaacaggcgggacgattactaaatttaaggtaaataatgatcccaacgacatctctattgaggcgatcccagaatctacttggacaggtttgtgtaagattaaaagtatccaatataagaggagatatggattttaattataataaaaaaggtagctttaagctaccttttttattacatagtttctattgctttttccatacgttgtatggtttcttctttaccgattatttcgatgacatcaaacatatgaggtcctttggcagcaccgataattgcaacacggaaaggattcatgactttactaaagcctaattgtttttcagtaatccatgcagaaatgattttttctgtattggcaaatgaatagtcatcgatagactttaggatatccagcaattctttcataagggccggtgtatcttctttccaatattttttagagtctttttcattgaactctgtaggtgctacaaaaaagaatttacaatcttcataaagatcggctacaaagttgtaacgttctttcatcaatgcacagatacgttctactttggctttgtcaaaagtcaatccatcggcttccagatatggtttgactaattcagaaagctctgcatctgattttgcaatcagatatttatggttgaaccatttggtcttttccggatcgaattttgcacctgatttcttgacgcgatccaaagagaattgttggcaaagttcttctagattaaagatttcctgttctgttcccggattccatcctaagagagccaacatgttgatgaatgcttcagggaaatatccgtcttctttatatccgtgccacttttctcctgttgcaggatctgtaaattccatcgggaataccgggaatcccattttattaccatcgcgtttgcttaatttaccgtttcctaccggcttaagaatcaatggcaggtgagcaaattccggcatggtgtcttcccaaccgaatgctctatataataaaacatggagcggaagtgaaggcagccattcttctccgcggattacgtggctgattttcatcagatggtcgtcaacgatatttgccaaatggtatgtaggcatgccatcggatttataaagcactttatcgtccaataatgagctgttgaagtgtacttctccacggatgatgtcatatagctttaaatcctcgttttcgggcattttaaagcgaattacgtagtgagttcctgcatccaataatttttgtacttcttctttagacaaattcagagagttttttaaacttcctctgctttttgcattgtacatgaaggtttctcctttgccttcgctttcttttcgtaatgcatccaactcttctgccgtatcaaatgagtagtatgcatttccggattcgacaagttggagggcatattgtctgtacatttctttgcgttcgctttgtcggtaaggtccatattcgcctccaacaccgacaccctcgtcaacggtgagcccacaccattttaacgattcgatgatatattcttcagctccaggaacgtatctggtctggtcagtatcttctattctcaaaaggaaatcgcctccgtgatggcgtgcaaacaaatagttgaagagtgctgttctaacgccgcctaagtgtaatgccccggtaggactgggtgcaaatcttactctgacttttctttccatgtttatatctcttatgtgtaattacaatttctgattttccaataggttgtgaaacaaatctttggcatattcaattgcccgtttgatagctgtttctttcgaagtgatattactgagtataggctcagcatggttaagtggtttgttggggtcatccgtcagcatatagaccgtatatttgccatttttcccatttttggttttgcttaccaatccaaaccagacatcaatggcttgattgtctacgtaaatagtgcgtttaactcgatacattaccctttgttttctttttgtttatgaaaatttaaaagagtaataacagctactaaacatgccatagctgcaatattgatgtacaccggagttttaagatcgcttggtgcaaaaagtatcaatgcgcttgaaaccatgatgaggaaagccgtcagcatgatcagtaatcggatgattttcatattctgcttttaaagtttcaaattgtttttgaccggatttgcgtatatttccaaataaatattgttaagcatggaaatattaccttctaatctatctattttctgagtcattacttgcatgaatttttctttttcttcttgcgtgtagaaagcagaaaatttattcatagagtgcaataaatcgtaggcaatataattattgggccacagtttaaagttgcgatgaattttattatcaatgatgttggccaatgcttcaactctgtctccatttgtcgggagtttgtttaattcatctaattcggcatcggtcaatctatctatgtggaagtgtacacgtcctttataactgcttaatccggtcaacatgctattcatgtcgtcttcaggagttttgatatattctccgacagtgcgggtgtataattcctgtgttttcagggcatcacatggttcccattcgtaagagatagccaacggcatgatacgtaactctttaaagtttgctgcaaaatttggtacaccactcatcttcagcatttttaaaagggcttgttgagtgcgatcatctccgttcttggtgcgtccttctttttctgcaatccaaatagaatcctgattttcattgattgtttctcggatatattttgagcggatagatgaactggtcagcatttcgcgtactgtaatgtctcgttcaattacaaaacatgaattcagttttacaaagtcggtaacccaatcgttaattaaaagattgcttccgattgccggtcgtgtatatttggcttcatatcctcgtagcagtacgttgagtatggctgagtctaaaataatgtcccgatggttggacatgaatgtgtaggaggtatttttatctaccaattcgagtccttcgacagtaacgccatcggtagtcatcttcattaatgcctgaatggcaggaccgaagaagttcacttgaaactggtctctcgtagaaatctgttgaagaccttttaccacaaagtctttgtctattttgagcagttttgaaaacaactctaggaattcaggagattgagagagacgcattgcagctgtttttacttcattgccacaataaggcctgatactgtcaaattcagagtccgatgtcatagtaatattttaaattagatactgaatggaaaatccactctttttcgggtacaaagataataaaaaagcgacaagccgagaaactaaagcctaaaagctgtcaattcctgagaaaagattgctgtttttaggctttaaataatgattctctcattattctgttctgcctggatatgttttcaatgcaacatccagtacttccatggctttttgtagatcactaattttaagcacataagctattctgacttcattttttccgaggccgggagtgtgatagaatccgttagccggagccagcatgactgtttggcgattgtaatcaaattcttctaatagccagcgggcaaatttttcggagtcgtcaaccggaagcttgactatggaatagaaagctccctgcggtgtggggcatacgacaccgggcattttatttaaggctttgaccataaaatctcttctacggatatactcttcatacacattgtggaagtattcatctgaggtttccaatgaagcttctgctgcaatttgtcccaaggcagggggacacagacgggccattccaaatttgagagaagtatttaatatttctttattacgactgataatggctccaacgcgtattccgcattcgctgtatctttttgacatcgaatcgaatagaattgtattttcctcgattcctttcaggttcattacggaaaaatgttttaatccgtcgtagcaatatcgtctgtaaacttcgtctgaatataggtatagattatgttttttaatcatttcacccaatgcttctaattccgcttgggaatagaggtagcctgtcgggttgttgggattgataatgacaactcctttggttttgggagttatctgtttttcaaattcgctgataggtggtaaggcgaaattattttcgatggtggcagttacggtttttattttagcaccaaccataatggcaaatgctgcatagttggcataaaaaggctctggaatgatgatttcatctccttcgttcagcgtgctcataaaagcaaaaagaatggcttcagagcctcctgtggtaattagaatattgtcttcatcgatcgaaattcctagcttttggtagtaactggccaatttggaacgtaatgtatggttgccggcagaatcagtatattcaatgacagacatttgtaaacgtcttactacttccaaggcaatctctggtgttgcaatatccggttgaccaatatttaagtgaaagacccgtatgcctctttcttttgcccggttggcataaggaaccaacttgcgtatgggagaggctggaaccattttccctttgtcggagatttgtaacatattcgtatcggttttgaggtttttgttagttttttgtgccctcaatgtacgaaaaaatcacaaacctgcaatcgttttcagtttttctgtattcaataatttgatttttcttccttttgaatcaactaacccttctgctttgtaatcagatagcaagcgtatgactgtttctgttgctgtaccgacaaagttgcttaaatcttctcgagtgatattgagttttaatgtgccatcatcttccattccaaaatcaccagccagaaggagcagtatttctgcaagccgttctcttaccgatttctgggcaatatcacggatgtatctgttggaatctcctaattctttacaagctatttgaaccatatcatacgcaaaaccggggttgctttttatcaaatggtgtaatgctgtatccggaatatagcataacactgtgtcggaaatggcttcaatggaactgcaggctggttcgtgtcggattacagatcggaaaccgaaaatatctccttcttgatcgaatttgataatctgttccttgccttcatgtcctgtctggtagattttaacgataccgcaatatacaaaataacatcccttgattcgattgccttcttcgtagatatgttcgccttttttatagaaacggatagagtctgaatttataagactttgaatttccgtgtctgtcaaagtagaaaaggactgttgtagttttttgcaacaggcttctggagtgggtaatgttatattggcattcataaggatgtttctgctttaatttcctctttcaagaggtttatttgtttggcaatatttgccgcatcaaagccacattcagcatataattgttgttgggttccatgttctataaatttgtctggtattcccaaggtaactaaatgtgcatgataatggtgggcaaccataaattctgaaacagcacttcctaaacctccattcagagttccgtcttccagcgtaatgatttttgaaaaatggtgacacacttcatgtaataaatcttcgtcaatgggttttaaaaatctcatatcataatgtgccacagaaatttcaggaaccattttaatggctttttgtgcttccatgccaatagcaccgattgaaatgattgctatttcttgtccagcagtcagacaatatcctttccctatttccaattgcttaaacggtgtgtgccaattaagcatagaaccgcgtcctctaggatagcggattgaaaacggaccttgattagacaattgggcggtatacatcatgttgcgtaattcctcttcatttagtggagctgcaataatcatattgggtatacatctaaaatatgccaagtcgtaagccccatggtgtgtggctccatcggaaccgaccaagcctcctctgtccagacagaatacaacgtttagcttttgcagtgctacatcatgaatgacctggtcgtatgcccgttgcatgaatgacgagtagatattacagaatggaataaatccctgagtggctaatccggcagaaaaagtcacggcatgttgctcggcaatccctacatcaaaacatctgtccggcatttcgtgcatcatgatatttaatgaacaaccggtaggcatagcaggtgtaatgccaatgattttgggattgctcttagcaagttccaaaattgtatgcccaaatacatcttgaaatttgatgggagcatctgaggttgattctttgatgcgttctcccgtctctttgttgaatttgccgggagcatgccagatggtttggtgtgtttcagcctccttaaagccttttcctttgactgtaatacaatgtagaactttaggtcctttgatgtgctttaaatcttctaatactttaaccaaatgttcaacatcatgtccatcaaccggaccgaaatagcgtaatcccatcgcttcgaaaagattactcctcttgagaagcatggatttgatgctattgtcgatgttttgtataaaacttctcatgcccggactaatacgattgagtttccccaatacattccatacatcctttttaaccttattataggtcttggaggttgtgatgtcgagtaggtattcatttaatcccccgacattgggatcaatggccatgttgttatcatttaagataaccaaaagattggaattatatacaccggcattgtttaatgcttcaaaagccatgcctcctgtcatagagccatctcctataatggctatgttttggcgttcgtcttctccatttagcttggaggcgatagccatacctaatgctgcggaaatggaggtggaggaatgtcctgtgccgaatgaatcgtattcactctcttcacggcgaggaaaaccactgatgcctccataaagtcgtttgtttttgaaggcttctttgcgtccggtcagaattttatgggcatacgactgatgccctacgtcccaaaccagattgtcgtaaggtgtattaaagacgtaatgcagtgccactgtcagttccactgttcctaagcttgagccaagatgaccgggattttctgcgcaatcatcaatgattttttggcgaacttccccacatagctgttccagcgattcttcaggcactttctttaaatcgtcaggtgtatttatagtatcgaggatactcatggttgcaatagacctctcttcctatttttaataaacgactgttcctattttttctccattcatcacctttttaaggttgccttcaatgtccatattaaatacgacaatgggaagatgattttctttacacatggtcgtggcagtaagatccatgacttttagtcctttgttataaatctcatcgtatgtgatttcatcgaattttacagcttgaggatccttttcagggtctgctgtataaataccgtcaacacgagtacctttcaacattgcatcggcttctatttcaattgcacgtagactgctgcctgtgtctgttgtaaaatagggatttcctgttcctgcactgaaaatagtgacatatccattctccaaatattcaacagctttagcttttgaataaaattctccgatgggctccatacgaatggctgtcaagactttatttttacaattttcattgtccagagcagaacttagtgccaaactgttgatgaccgttgctaacatacccatgctatcgcctttgacgcgatcaaatcctttgtttgtgccgcttaagcccctgaagatattacctccaccgataacaataccaacttgtattcccatgtctacaatttcttttatttggcgggcatagctttcaacacgcttaacatcaataccatatctttgttcgcccattagcgattcaccactcaattttagcagtactcttttgtatctcatcgttttattgacttttaatagtataaatataaatagccataatgctataaaagtagaacaaagctaacgaattttgtccgatattttagaacaatgccttaaaaaatagcagatatatttttttgtggagaattataaggctgtatttgcataattctttgtaacttgcacgccaatttcgtggggtagtatctctgcggaaaatcaaatctgatagtagaatggaaaataagactgcagcttacaaatttaccattgttgttcccgtatttaatgaagagggaaatatgtcccgtttggaaacagtattaaaagattttaaagaacaagctcgagtaaagacttgtgtgctttttgtgaatgatggttcaactgacgccagtgggaatatgatgaaggagatatgtgccagacagtcggatttcttttttattgagtgtgtgcgtaatggtggtttgagtgctgctatgaaagccggaattgattattgttattccgacttggttgggtatatagatgcggatttgcagacaactcctgaggattttaatttattattgcagcataccgatgactttgagctggtcatggggatacgtacgggtcgtaaggatagtattgtaaagaatctttcttcaaggatagcaaatggctttcgtcgtatgatgactcatgatggagtagaagataccggatgtcctttgaaaatacttcatacggattatgcaaagcgtattccattttttacgggaatgcaccgctttttgcctgctttgattcaattgcaaaatggtcgtgtatttcaagttcctgttcgtcatttccctcgggttgccgggaaatctaaataccatttgtttaaccgcttgattggtccgttcaaagactgttttgcttatcgttggatgaagaaacgatatattaattaccaaataggtgataataatctatagtcggttctggattattcttttttagggtgtttcattatccagatgttacgaatgtagacaatcaatccggtagattgtcccaatatcaggacaggatcatgtcttactagtgcatagctgacaatgatgcaggagcctgtcaggctaattacccaaaatcccaagggtagcaaggattcttgtctttttctggaatatatccattgatatataaaacggagcgtaaatataatctgtcctaatgatccccagatcaataaccaaagcggaatgtcttcattgtggaagaattcgcggataaaatcttggaactcgttgagcatatagcctattgccatgaaaggagtggcaattagcaaataacgtatggggcgagggattttcttccattcgttttttatgtcaagattccaaatatagatataatatgaaatcaattgtccaaggataatggcaaagtcactacgtagccaaccgtaaaaaaacaacagataagatccaagcagacttaacagccaaaaaatagatggagaaacaacttgtttcgccttttcggacataatccattggaataaaagacgtccggaaaagcatacttgcgcaaggaaaccaataatatatatcatttatttagggtttgatgaaaatacaaatatccaatagcccccaatgaggtaagattctgtatttccggtgagggcatggagttccggattccgttttctctctttatcgcggacaaaaagaataaaattttcttttcctatacgctctcttatttcattgatgttaaggggatgtacactttgacctaaataggcatccatattttcggcacttctgaaaggaaaataatggtattttttaatattcctctcatgtgcaagagcttctgcctttgttgtaatggctttgaagccgatcatgggatttaaagcagggatagtaaatgaaccgacaaaaacggtaattagaagacctatggccatactattaattgcaggtaataattgcttgcgatatagaaagtataatgcacagatagaacctgttgtcagtacaaatgttgatagcgggtagaggattgtaggggtaaagggaaattctatagtgtaaagtgctataaaataaccggggaatgccaatgcaagaatagttgccggaatgacaaccataattcttagccaacgttctgacaatgatggtagcattagggctgccagatagcctataaatggaaatattggcaacatataaatatccaatttgccgctgaatatggatagagcaacaaaagtagtggtaataatgaccaagaaaaaccgttttatgtcgctattgagcagtttttttcgtattcctgtgataatggctgtaagatatagaagaatccaaggagctaaagaataccagatggttttcagatagtaccaaaacggggctttgtggtggaaagcatccacagctcgattgacagtttgattgaaaagcaggttatttagatagggttttcctccctcaatgtatacacagccaaaccatgtaaagcataatcctaaaagaattccccattgtttccagcctaaaaaatgtccgaatgtccgaattttaccttgccaccacagaaatacaggaatactgatgataggtactagaatgcctacaggccctttggtgaaaacagccagaaaaatatatatgggcaatagaatagggtcgtatttattttcttttccagtgtaacatttgtagaaggtatataatgccaatacgatgaacatacacatgagcatatccattcttagcacaattgccgaaccaataaagagtccggaagttatcatcattaatatgatgctgttacgatagcgtccattaagaaatggtgttacccatttgtccattatatggatggtaataaatgccggaatcagtgaaaatagtcctaaaaagaacatattgtgtgtaccgaacagccatttccctagcattacaatccaaagatataagggtggtttgtctgcataaggagctccatgattccaaaatgcaaagaaatgactatcgcgcaatgcttcatctgctatgcttaaatactttaattcattgtttggtgtgaagtccctaaagagtagtaagggaacaaaacagagaaaaagtagcagatacttagctagtttcatttttgtgtttttagtaaaatgagtgtgcaaataacgcaactaatttagtttgaaagatttgatttagcaaatatcttgttgggtttctgtgttgttgtataaaagaaaactcccgggaatccgggagtttggaattttgtgagtgtgtggtattaccactttgtgagaaaactggccattaaggtaaagtgctaggatttatgaccagttatggattacagatgaattatctatgtgctaatttagtgtataaagttgtaaattgttttggaatactctttttctgattgagaatgtgattttgtaatatatagtgaatcagtgtattatgtttttattcgaaggaaaaattgataattacgcataggtgattcttctataaggctattggggttgtgattttgagaggacaaaaaaaacgcttcccatcgagaagcgttttttataaatagactttttaattagtcgttcaaagtaaagcggatgaaacttgttactgttaaatccttatctacagaagtaaggtaagctcttacgctttgttttgcatcttttacaaaagcttggttcaacaatgttgcttcctgatagaatttgttcagacgaccttctgcgattttgtccagcatgttttcaggttttccctcttcacgtgctttgtcacgtccaatctgcaattcgtgctcaataacgttctgcggaacatcagttttatcaactgcgataggagccatagctgcagcttgcatagcaacgtctttcttcacctgagtttcagcttctttgttgaaaccaacaacagttgctaatttgtttcccgggtggatataagcgattgttgcttctgcttcgattttgccgtaatatgccaattccagtttttcgccgataacaccggtttgctctgaaatgtggtcagctattgaacgtccgtcaatagtcaaagccaataatgcttctttgtctgcaggcatattttcgaatgcacagtcaagaatctggtgtgtgaagttaacgaagttttcgtttttagcaacgaagtcggtttcgcagttcaagctcaccataactccttttttgccttctgcacgagccagaacacagccttctttagcttcgcggtcagcacgtttgctggcaacaatcaaacctcttttgcggatgatgtcaactgctttgtcgaaatctccttcagcttcctgaagagcttttttgcagtccatcatacctgcgttagttgcatggcgcaacttcattacgtcagctgcttttatttccataattgatagagcattaaaagttcaaaaattattcttctgttgcagtttcttcagcaacttcttctgcttcagcaccggctactttttcgcttcttttagctaccggtttcttatcagcgccttctttgtctttctctgctttacgttcagtcagaccttctttgatagcgctagctacgttgtcaatgatgaggctgattgaagttgaagcatcgtcgttacacggaattacaaagtcaataccgcttgggtctgagtttgtatcaaccatagcaaatacaggaatacctaagctacgtgcttctttgacagcgatgttttctttcattacgtcaacaacgaaaagagctgccggcagacgagttaagtctgcgatactgccaaggtttttgtccaatttagcgcgttggcgagaaatctgaagcttttcacgttttgaaaggtggtcgaatgttccatctttctccatcttatcgatgtttgtcatcttcttcactgccttacggatagtggggaagtttgtcaacatacctcccggccatctttcggttacgtatggcatgttgatattagcgattttttcagcaacaatgtccttagcctgtttttttgttgcaacaaacagaattttacgtcctgatttagcaatttgcttcagagccatagaagctttgtcaagcataactgctgttttgttcaggtcaatgatgtggatatcattacgctccataaaaatatacggagccattttaggattccatttacgggtaaggtgtccaaagtgacaacctgcattcaataattcgtcgaaatttgacatttgtcttttgtttaaagtttactttcttaattttcgcaattgccaggtagctctctttgagaagtcctgccaatttagatactaaactgagattaacgtttagagaactggaatctcttacgtgctttgggctggccaggtttcttacgttctacttcacgaggatcgcgagtcatgaaacctgctgctcttaattttgctttgtcttctgcattgattgcaaccaaagctctagcaattccaaggcgtaaagcttctgcctgtcctttgaaaccgccaccgtcaaggtttactttgatgtcatactgacctgcaacacctaacagttcgaggggttgttttacaatgtactggagtgtcggtaaagtaaaatattcttccaatgaacgtttgttgatggtgatatttccttttccctctcttacgtaaacgcgagctactgctgcttttcttcttccgattgcgttaattacttccatgatctgttattttaaagagtttaaatcaattaccttcggctgctgagcttcgtgtttgtgttcagtgcctgcatacaggtgaaggtttttcaatactgctcttcccagacgatttttaggaagcataccgcgtacagcgtgctggattactctttccggatggctttttaatacagcttccggagaagtgtggcgctgaccgcctggatatccggtgtgacgggtataaactttgtcggttaacttgttaccggttaatgcgattttttctacgttgatgatgatgacgttgtcgccacaatcctcaaacggagtgtaggatggtttgtacttgcctcttaaaagtttcgcaactttagcagcaagacgtcccaaaacctgattctctgcgtcaatcaaaacccattctttttgtgctgtggctttgttgacataagttgttttgtaacttacttgatccactttctttaatttttaaaattgaacatctgtttgttttttgaaatggaatgcgcttgcaattagtctgttatggaaaaacgcggtagtcgggcagactagaaaatccttaactgacaaatgtgcctgcaaggtaaatggctaaggttcagccttgcagtttaaagtgtagaccacttcaaaatgaggtgcaaagataaggaaactttctttattctcaaatactttctgctttttattgctctctcttattcctgtctttctcaattatatgacacctagtagttaaatataataatctgttatctttgaattatatttgtgatatttttatgttatatttgacatatacttgattaaaagatgagcaagagaagggtgggaagggaatgggtctagcgattttggtgtatatttgcagcatggcaggaatctatatacatatcccgttttgtcggagcaagtgtttttattgcggattttattctgttacttctttgcaattgaaaaaggagtatgtcgaagcgttgtgtcgggaagtggagttgcgaaagaattatctttctgcaaatcagatatctacgttatatttcggaggaggtactccctcttgtttggaagtggatgaactggggactattgtagcttgtgtgcgtaaatattggaatttggctgatgatttggaattttctctggagatgaatccggaggatgcgcaggaatcgaagcttttggcttttagaaatttaggagtgaataggctgacaataggggtgcagtcttttaatgatgatgtgttgaaaagaatcaatcggactcattcggctttgcaggctttggaggcggttggcgttgctaaggcttgtggctttgacaatatcgggattgatttgattatcggattgccgggaagtacattacaggatttgcagcgagaaattgaaattataaaatcgttggatattagtcatgtgtcggtatatatattgagtgttgattctaataccgtgtttgagaaattgcttgaaaaagggaaattctctccgcaggatgatgatttgctggcggaacagtatttgtttgtgtccgaaagtttgcaacaaattggttatgagcattatgaaatatctaattttgcaaaagattccaagtattctcgtcataatacgtcctattggcaacaagttccttatttggggataggagctgcagcccattctttcgatggtggatccaggcaatggaatgtttctcatgtaaagaaatatattgatagtctaaataatggcgatttgatatttgagaaggaggtattaagcgatcgtgatttattcaatgaatatctcatgaccaattttcgtacgatgtggggaattgaaccgaaataccttgaagaaacaaatcctgtttggtggagggggattgagagtaggttggaagattatatgaagagaggtttgatgtcttggtgtggggataaaatacggcttactgagaggggctggctgttatcagatggtatttttagcgaattgtttgtttaaacttggaaagtgtatagttttttcagtgcgaattacttatctttgcaaatccgtgtgttatgcgtcacggaaaaatagttaatagatcaaacgagaaaaatgaaagagatggacacaacaaaattgtcaatcaaagagttgttgcaatcaggagattgtggcaaggaagtagaaatctgcggttgggtaagaaccaaaagaggtaataaacaggtgaattttatcgctctgaatgatggttctacgattaataatatacaggttgttgtggatatgaataatttcccggaagacttgatgaaaaaagtaactaccggtgctgccatccatgtgaaaggtctgttggtggaaagtgcgggaagcggacagagccgtgaaatccaagctacggttttggatgttttgggtgaagcagatcctgacaaatatccaatccagcctaaaaaacatagtctggagtttttgcgtgaggtggctcatttgcgtttccgtaccaatacatttggagctgttttccgtattcgccatgcaatggcttttgccatccaccagtattttaatcagaaaggttttttctatttacacactccgttgattacagcttcggattgcgagggtgccggtgaaatgttccgtgtgacaactttggatgcaaaaaatcctcctttgacggaagacggtcaggttgatttcaaacaggatttttttggtaaagcaaccaatctgacagtgagtggacagctggagggtgaattgggtgcgatggcattgggtaagatttatactttcggaccgacattccgtgctgagaattcaaatactactcgtcacctttccgagttctggatgattgagccggaagctgcgttctatgacctgaacgataatatggatttggctgaggatttcttgaaatacttgatccgttatgctttggataactgtatggatgatttgaaattcttgagtgcccgtttgcaggaagaggaaaagaataaaaaagcagaagagcgttcaatggagttgattgaaaagttgaattttgttttgactcatgattttgagcgtgtaacatatactgatgctgtagaaatcttgaagaacagcaagcctaataagaccggtaagttccagtatccggtggaaggatggggagttgatttgcaaagtgagcatgagcgttatcttgtagagaagcattttaagaagccggtgattttgacaggttatcccaaagaaatcaaggcattttatatgaagcagaatccggatggcaagaccgttgctgcgatggatgtattattccctcagattggagagattataggtggctctcagcgtgaggagaatttggataaactgcttgcccgcatgaatgaggtcggaattcctgtagacagtatgcagtattatttggatactcgtcgttttggttctgccgttcacagtggttttggattaggttttgagcgtctgttgctttttgttaccggtatgggtaatatccgtgacgtgatacctttcccacgtactccgaagaatgcggaattttaagtcgggggactgaatttttaattactcaaattgcgaaattttctgttcgaatatgctaaaacagagtttacaacaaaagctaggcttaaagattaacccgctccagattcagctgatcaaattgttggaattgccgacttatcagttggaacagcgtataaaagaggagttggaacagaatcctttgttggaggaagtggagaataagacagaggtggatgtgaatgatgagcctttggctgacgagcatatcgatgatgaaaataatgaatttgaggaacaggaaaatgaagatttctcttccagtgaagatgacttttctttagaagattatatgggggacgacgacgatgatattccggattatcgtctgtcggcctctaatgtatctcctgatgatgatagtcgtgattttgttctttcgcaaggagcttcttttcgggagagtttgttaaatcaattgggaacacgtcctttgtcggagttcgatcagaaagtggcggaatatatcattggaaatattgatgatgacggctatttgcgacgtgatatcgagaatattgtggacgacttggcttttggggcaggagtagaggtgtctgaagagcaggtgcttcgcttgttgcatttgatacaggaatttgagcctgccggtgtaggagccagggatttgcatgaatgtctgttgttgcagatcgaacatcgtttggctgataatccagaaaataaagtgttgttggatgctcgtcagattttgacggaatgttttgaagagttttccaggaaacattatgaaaagatagcccgcaaattgcggatggatgatacggaattgaaattggcttgtgatgaaatacttcgtttgaatcccaagccagggggaacattggctgatgtttcgatagggagtgaggctgaaaagattattcctgactttacgcttgatttggtggatggagagttgcagttgagtctgaattcgggggatattccggaattaagaatcaataagtcgtatctcaacatgttggagcaatatcagaatggggagaatgacaagaataagaaagatgttgtttcctttgtcaagtataagttgaattcggcaaaatcgtttatcgatgccgtacagcagcgaaacaatactttgatgttgacgatgacagccatcgtccagtttcaaaaacagttctttctgacaggagatgagaacatgttgaaaccgatgattttaaaagatattgctgatgtaacagggttggatgtttcaaccatttcacgggtatccaattccaaatatatacagacatggtttggtatatatgctttgaaagactttttttcaggcagtatgcagacaacaagcggagaggaagtcagtaccagtgaattgaaaaatgtggtgaaaggtttgatagacggggaggataagagaaagcctttgacggatgacgagttggtggcattgatggagaaaaagggttatcagatagcgagacgaacagtggctaaatatcgtcagatgcttgatattccggtggctcgtttgagaagagaaatataattcaagatgatgaagattttagcaaaaacgatatcttatgtgctgcatccttttttgatgcccatatatgcacttcttttcctttttagtagcggatcgatgtttgctttgatacctagagctacgcaaatttattgttatatagtaacgttgtttgtcctgttattgatgccgatgttgagtctgccgctgtttaagcgattgcaattaataagggattttcatttggaagacaagcaggagcgggtgtatccgatattagtgactgtagcttttacttttttgggtttttggctattggggcgggttgcctatacacatattgtgcagcagctctatttggtattgattattctgttgtctgttttttctgtcgtgaccttgagatggaaaatgagtatgcacatgactgcgatgggtggattgtgtggttttttgctggtattgggtatgaaatatccgggtgatatgcgtggtagttttatatttgtcatgttgcttgcagggctgctggcggccagccgtctttacttgaacaagcataattcactgcaagtgtatgtcggttttttgtttggagctttagcggtttggggtattcttttctgattatctgactttgtgaacccaaatatcctgtcgcttggtgattgcacggtatttgtctaatgctgcagtagcatccgcttctgtcgggaagccggcaatgctgacacggtatctttgggaggaatagatcaatgaggccggatggttttcggctttcagccgttttacaattttttctgcactggctttgtcattctctttgaaactggcaacaatgatatgatattttagttctttggctgcaggtgttttttcaagagttttttcttttgtagtagtatcctttttgatttgaggggttgttacgttcttttctatgctacggacaacacggatattgcttagatattcattgggtaaagagcgctccttgcatccgagaaacaggaaactgacagccaaaaaagatattaatactttcatattttgaatatttttgttgcaaatatagcgaaaggttggagcaaaaaaaatataatggcagagtcgtggtctttatgaggatataaattaattttgcggtctattaaaccacatacaaacattgaaatgaaaaagatattttattgccttatggtaggggttctgctttgggggtgtaagcaggatgaaggtacggtattgcgcttggaaacttcgttaggggatgtccggttgcgtctttatgatgagaccgtattgcatcgtgaaaatattttgaaacttgtgcgtaacgggttttataatggtttgctgtttcatcgggttattcaggattttatgattcaaacgggagatccggattctcgcatggcacagacgggtacgcttcttggagaaaaagatgccggttataccttgaaagctgaaattttgcctcagtattttcataaaaaaggggctttggcagcagcacgcgaaggggatgaggttaatcctgaacgtaattcaagcggctcgcatttttatatagtgaaaggaaaagtctatacgcaggaagaattgacggaactggtcgaaaaaattaatcatcggcgttttacagccttgttgaatacgataaaagcttctaaggcagaggagattgtccagtgtcgtttgagaggtgattctttagcttttgaaagattaaaagatatagatgctgagattttgcaaacagcacggcatcagtttgccgctgataaattgacgctttctccggagcaggaaaagatatatacaacaatcgggggtacacctcatttggatggagcttatactgtctttggggaagttatagaaggattggatgtggtggataaaatatcggctgtgcctgttgacaagaacgctcggccattggaaaatgtggtgattgaaaaaattgttatcgaatagaaataaccgggcttaaagtccggttattttttttatctcatttaatttgttcaaagcttccaaaggtgtgaggctgttaatgtctagtcctgcaatttcctcacggatttgagttagaactgggtcgtccaattggaaaaagctgagttgcaaaccttcccgggcttctgcaatatgctcaacatttttgtgcagatggtcattcttgtctttgctgtcttccagttgctttaatatgtcatcagcccgtttgacaacggattggggaagtcctgccattttgcctacctgaataccgaaagaatggttggaaccgcctctcactaatttacgcaaaaaaatcactttgttgccaacttctttgaccgaaacattgtagtttttgattttcttgaaagagcgttccatttcgttcagttcgtgatagtgtgtggcaaacagtgtcttggcatggtatttcggatgttcatgcaggtattcgacaatggcccaggcgatggaaataccgtcataggtagaggtgcctcttcccaattcgtcaaacagtaccaggcaacggtctgaaatgttgtttagaatgttggcggcttcattcatttccaccatgaatgtggattctccttgagagatattgtcagaagctccgacacgggtgaatattctgtctatatagccgatattagcagcttctgccggaacaaaacagccggcttgagccattatcacgatgagggctgtttggcgcagcagggctgatttaccagccatgttcggtccggtgataatgataatttgttgtttctccttatcaagataaacattgttggaaatatattcttctccgggaggcaattgtttttcaatgaccggatgtcgtccttcccggatatcaatgatatctgaatcgtccacttgggggcggtggtaattattggctttggacacttctgcaaaagccaccagcgtatcgatggctgacaggattttggcatctgcctgaagtggccgtatgtattctgcagcctctgacagcagggtgttgtataattctgtttcgatggcaagaattcggtcttcagcacctaatatcttgtcttcatattctttcaactccggagttatataacgttcgccgtttacaagagtttgtttgcgaatccaggtagccggtgctttgtctttatgggttttggtgacctcgatataatagccaaatacattgttgaatcctattttcagagaagggatgccggttgcttcgctttcccgttgttggatttccaatagtttttcttttccatgggaagaaatattgcgaagttcgtccaattctgcgtgtacaccttctgcaatgacgtttccctttgctacctgttggggggcgttttcttgtatttggcggttgattttttcatataatggcaggcatgggtcaagtttatctgcaagttcctgcagaattttcacacctgattgtatgcacatttcttttaagggaggaatgttggccaaagctgttttcagttgattcatctctcgcggagaaatgcgtcctacaccaatttttgaggtcagtcgttccaggtctccgatatgttctaacgactcttctgtttctacccgttctttttcatgccggatgaaatagtctacaatatccaggcgccggttgatttcttccggtgatttcaacggcatactgatccatcgtctgagagttctgcttcccataggggtggtggttttgtccagaatatccaccagagagcatcctccttcgaaagtggaatttagcaattcaagattgcgtaaagtaaatctgtccaacaatacatgatgggattcgtcaattcgagatatggtcgtcagatgcgaaatcatatcatgctttgtcatttcaagatagtgcagtatggctccggaagctgaaatagcgctgttcatacgttcgattccgaaacctttgagagaggagacctcaaaatgttttattaatcgttctgtggcagaatccttgtcaaaaaaccactcttcaatgggatagatatagaatttattaccaaaaagttcgtggaattttgcttcttgtcctttgggataaatcacttctttaggctggaaactgtttaataatttgtcaatagtggcatgagtaccttcagtcgttaggaattcgcctgtagatagatctaaaagcgctaagcctatgtctgctttattgaaaaataccgatgcaaggaagatgttgcatttggtgtccgaagaatattcattatatgaaactccgggtgtcaccagctcaatgactccccgttttaccaggaactttgtttttttagggtcttccaattgttcgcagatggcaacccgctgtccggctctgaccaatttgggcagataattgtctatggcatgaaaagggaatcctgccagttctacgctaccgggatttcccgatgaacgttttgtgagagtgattcctaaaattctcgaagtggtaatggcatcttctccaaaagtctcatagaaatcgcccattcggtaaagcagcagtgcgtcaggatattttgccttcatcgcataatactgtttcattaacggggtctcgccgccatctttctttgccataaacttttgtatttatattgtttttaaatagagatttcaaagataaatatttttgccaagaaaagtttaaaacctcacgaacattgtgtaattttgtcctcaatattatagggaattggttggaatgaaaataaaataatagagataatggagcagatagcagaaactttagcaacgtataatgggacaaatctggacgaacgtatacagtttgatttggacagcattgtcgaacgagaagccaaacaggcatattgtgttgagggtttggaattttgtgcatcctgcatggattacacgactctgaagttgacagatacggacgaatcggtacgggcttttgttgtggagatgttgaaaaaattgaagaagtacgaacttaagccggtcgctgcagtatgtgtttatccgcaatttgctgctattgtgcgtgaagagttgcgttcaacagatatacagacggctgttgttgccggtaacttcccaacttctcagagttttcttgaaataaaattggcagagataaaaatggctgtcgaagctggagcacaggaagtggatgttgttatttctgtgggtgatatgctggaaaagaattatgaaaaagtgtatcatgatttaaaggcaaaacgtgaggcttgtaaagacgtattgatgaaggtgattttggaaacaggagaattaaaggatttcgaaatgattttcaatgcttcgttaatagcagcttatgccggtgctgattttatcaagacatctacaggtaaggttccggtaaatgcaacaccggaatccgtatatgttatgtgtgaagccatccgtcagttttatgctcaaacaggtaaaaaagtaggtttgaaggttgccggaggagtatctaaggctcagaatgcaattcgttatttggcaattgtcaatcatatgctgggtcaagaatggctgaactcatctcttttccgtattggagcatctcaattgatggaggatgttgtgaaagaaattaaagcgttgcaaggacaacagtaaaatataggggtgaaagccggattataggggtgtaatccggcaattttgacttcccgctgacagatgccggcgggaagttttttatttctttaaattggtagcttgaggtattgtaatgcctatgttaaccaatcccatgatatatgattcattaaaatgattaaaataagctcgtgctcctatgctccagattttgttgattctaaaattataaccggcattggcagcaaatccaatgccgttgtcgtttgattttagccaataggtttccggtgtattgtcaattgtttctgacaataattgtatgtggctgtcatgagaaaaattgatagttgtacctataaaaatcagatgatttgtagtattcagtggcataagatagatgctgggtcctataaaataattattgacatggatatcagattttatatgattgccaccgtatggtccctctttcatattgccggagctaagacctaagtctatgccatagccccatagtttattgggcatgtatataaaagaatttaccataccgaatccattcatgaattcagaatgtgagtagccgtagctactcattattacgaaattctttttaggataggtttggctttttgcaatagaaaaagccaaacagattataagaagtaatgcgatttttttcatggttatttgacttggatattgtaatgtacgattcctgtattgtaaaatgtttgttttcatctgacaatgttttgatttaaatttaatttttcatttacaaaagcttttgtgtattgcaaatatataagagttattaccaagatggcattgtaaaaagtgaaaatgatgttgtaacacttgatttgtatgtgtctgaaaataagcataatacaactaaagttcatgggaaaagtttgtaaaattatttaccttgattgtattgttgtaaaatgaggtgatatttaatcagaaatttgtgttttgtggtattgttgtggatggaagttttgtttcaagaaagtgaatgatatcttccccttcttgcatatttagttttttacggatggatgtttttcttttctgtattgagaaaatgctttgctccaccatgaatgcaatatctccagtatcaaatccgacacgaagcaggcagcatagttgctgttctttttcatttaacagatgtccatatgtggctgttaaacgtttttgaaatgagttatgtaatatatttgttgcttcataaatggatttccaataattatcaccgttttgtgcggtgtaaataagttctttgaagtttttgtttgtggtttgcagacattgtgctttagctacttgacaagcaatggataaattgtgtagaatggattgttgtagttgtaatgtattgttatctagtaggttttgtagtttttgagacagatcataagcttggatgtattgtgatttcctttttcggatgcgatagtatagacataaaataattatggcactaatgattaatataattaatgctgtgatatagaaggttagttgttggttgctgtatttaaggtgttcttggtttattttaagttgtaggtatttttctctggctaagtctaagcgtattttctttttattattatatatttcttgcatttctttgttgcatattgctaaaatatcagcagcgtattggaattgtttttgtttgtaatataatttggctaataagttctggtatcgcagatacaagtttttgtttttagagaattgttggatgggaatttgctgtagggtttgttggagcatatgaatggaatcttctttgtaatagatatctgcacgtattaataatgccttggcactgtcttgtggtgtgggattgagttgcaatagatgttcaatatagtgagttgcttgggagtattgtccggttttattgaaagaatatgccaaatcgtaacatatcgtttgtatttgagctgtgtcttttaaaatgtttatatcgttcaggagtttttggcaccattctacagcttgggaatggtggtctaaatataaaaaggcataaggaatgtctataaaataattgtatttcgtgagattgtgtattaattctggaacttcttttagtagtagaatcaatttttggtattgtgttttggcatgactattattgttgttttctcgatagatttttcctagttcatgataaatttgaagcaggtagcttttattttttaggtgcatggcgatgttttcagcttcgattaaaatttccaaagctttttcttgttgcccggctttttggtaggcaatacttgtacatatttgaagaaagcaggctttttcgaattctttttgttttaagaaaacgtttgcgctattttgtagcaaagtatcttttgcatggattgttttctgtttgtattgtgtctttgcccatagatacaggtaattgtttttattagtttctgataatgcatcccaagtggtagagtctagtttgcgtagaatttcttgcgttgacatatcgggattggacaaaatgttttcaataattttgtctgattttctacagctgacgagactatagaagcatattgtaataaataaccatttcatataatcaagccagaccgttttcgatttcgagtttgtcttcgtcgatatcttcttcttcatcatagatttgcagcaatggttcagctttgaagttgcgttgcgtgatactgtgagccatggtgagcaacagagaaggaagcaatatcaaattggcaagcatagctccgaaaagtgtaatacttgtaagcaatcccaatgcaaaggtgccaccaaagcttgatagacagaatattccgaatccgaagaataggatgatggaagtatatatcatgctctgtccggtttctttcaaggcaaggactacggaacgggccatgtcccatccggtagcctgaagctcctggcgatatttggctaaatagtggatggtgttgtccaccgagataccgaaagctacgctgaatacaagtatggtagatgccttaatcggtatgccggcatatcccatgatggctgctgtgataatctgcggaataacattaggtactaaagcgataagcaccattcgtttactcttgaacatccatgccataaaacttgcaattagcacgatggcaagcgcaagtgaggagaatagattggaaatcaaatattgatttcctttaaagaaaatgatactggaacctgttacagtaacatcgtatttgtcggacgggaatatcttgtcaatggttttgtagagggaatcctctttggctgccattttcttggtgccgatatccttgacacggaaacttaaacgagccttttgcatggctgtatctacaaatgatttagccatatcacttgcaccttctgtggattcggcaacgtacttcatgatgaagtttttggtcatattggtcggtagcttgtaataagatgccttgccattgtagtatgcctgattggcaaatttggctgcttctactacagagagagcttttgaaaggtcggggtcagaagaaagttctttgtccaggcgatcgagtttctccaagttgtttaattggaaaacgcggttgggtttgccaaaatcaattgtgatttcaagtggcatgagaccatcaaagttttcttcgaagaaagctaaatcttgtcggattggatctgtttcttttaaatcatcaaccatatatccagttgtcttcatctgggtgattccgataataccggcaacgactaaagcagcagcgatataatatgctgtgtgtcttcgactggtgacaatgtatatcagcttgtcaatcaatttgttgataaacggattgttgagatgtttggtctgtttggcttccggtgccggtagaaagctgaagattgtaggtatcagtatcaagcagataaagaatacgcaggcaatactaaggaatgccacccaaccgaaatcgacgagtatttggctggaggtaatcgtgaaggtggcaaaaccggctgccgtggtcagatttgataatagcgaggcattacccactttttgtaccatgcgttgcaatgctttgattttattgccgtggcgcatgtattccgcatggtatttgttaatcatgtagacacaattagggatgccgattacaatcagcaaaggggggagcatcgctgtcagcaatgtgattttaacactgagaatcgccatgattcctaaggcccagataacgctgatgccgatgatgccgacgctgaatccgactatgcggaacgatcggaagaaaagatatagaataatggcggtaatcaacagtgacaaggcgatgaacatgtacatttcaccttttatgttttcggcgttgataactcgaatataaggcatgccggaatagtgcatgtgtatggaatgtttgtcggtgaagcggttggtgattttgagaatgtcatccaccaattgtactcgcttgggagaattcatcacctctgcagagacagtgaccatcatgccataagtgtttgtctctttattaagcaataatccgtcgtagaatggcagattttctgcgataaaagccaagctgtccagttctgctttatcatcaattcgatgagggaagatggggcgaacctcaaatttgcgtaattccgtatttttatggagattaaacgtgtgggtaatatccatcaaggcggttacacccttgagagccttgatggagtcgcccatggcaatccaatcgtttaatttgtcaagtttgtaaaaatcattatcctgtactgcaaataccatgacattcccttcttgtccgaaggtctcgcggaaacgggtataatccatataggcgctgtcggtcttgggtaataaatcagcgctttcgtatgacatttgaatcttccgtgcttgaaatcccataaaggccgtgcacaataggacggctataataaaagctatcctgtaacgtaatataagccctgcagtcttagtccacattatatttaattttttcgaaattacaaagttagaaagaatccctttaaggtgtctggattttaggattgtttttgtgtctttttttatctctatttgtttttttactgaaattatcttccatggcttgagttagatccaccccggtttgattggcaaggcaggtgagaacccataagacgtcagccatttcgtctgccaggttttctttttctccttctttaaaggattgttcgccgtatttacgagccataacacgagctaattcaccaacttcttccattaatatggctgtgttggtcagttcgttaaaatagcggactccgtattctttaatccattggtcaacgcgggcttgtaattcttgcagttccatactagatgatattaaatacgatttttggagtcaataataatggttacggggccgtcgttgagcagttccactttcatgtctgctccgaatactccggtttttacacttttcccaagagtggaggaaagtgtttttacaaattgttcataaaggggaatggatatatccggtttggcggcatcaatgtaagatggacgattccctttttttgtgcgggccataagcgtaaattggctgactgccagaatatcacctccggattcaaggatggagcggttcattactccgtcattgtcatcaaatatacggaggttgcaaattttggtagagagccattcaatatcttcatttgtatcatcggcttgtatacctattaaaatcatcataccttcttgtatggaggaatatagttggttgtcaatggttacacttgcatgctgaacacgttgtattacaactttcatggtaaaaacaaattattttaagggtttggattgattttacaaaaataggaaaagtaattgacatcaattattcgtatgtctgaattaatttattatttttgcaccatgcatgatggctgagtagttcaatggatagaacggaagtttcctaaactttagattcgggttcgattcccggctcggctactatttatatttccagcttatttaatttgtggtaatgtctctgattggtgaatttgcaaccaatttgcaaccgaataagtttttgtcttgtctgtaattttatatttttgtctttatttgaattcaaaatgtcactgaaaatgagaattataattttgcttttttgtgtttttattttggggtctaaacaaacgagcaaattataataccgtaaatgtagtggaatcgggtgataatttcctatttttgtatgaaactataaattacgattatggaaaactttatttttcaaaaccctactaaattgatttttgggaaagggatgattgctcagttggcaaaggaaattccggcagaaaaacgcgtgatggtgactttcggtggaggaagtgtgaagaaaaatggtgtatatgatcaggtgaaggaggctttgaaagcttttgaggttgttgaattttggggaattgaatcaaatccgaaagtggagactttgcgtgaagctatcaaattgggaaaagagaagcaagtggattttctgttggcagtgggaggaggaagtgtgattgatggcacaaaattaatagctgccggtttgttatatgatggagatgcttgggatttggttttgaagggggtaagcaagcatgctgtacctttagctactgtgttgactcttccggcaacaggttcggagatgaacaatggagctgtgatttcgagaaaagaaacagctgagaaatttgcattttattcttttaatccagtgttttctattcttgatccgacagtgacatttactttgccgaaatggcaagtggcttgcggtattgctgatacttttgtacacgtcatggagcaatatatgactcgtccgggacagtctcgtttgatggatcgctgggcagaaggagtaatccagtcgttggttgaaatagcgccatccatcatggaaaatcaggaggattatgataaaatggctgattttatgctttgtgctacgatgggattgaatcactttattgcaatgggggtatgtgaagactgggctactcatatgataggacatgaattgactgcgttgcatggcttgactcatggagctacgttggcaattgtattgcctggcttgtggcgtacgttgaaacagaaaaaaatggctaaactggtacagctcggtgaacgtgtatggggtattcaggatgggtcggatgaagaacgtgctgatcggacaatagaaaagacggaggcatttttccgtagtttagggctgcctactcgactaggagatgcgcagataggtgatgatacaattattgaaattgaacgtcgttttatagagaggaaagtaggcttcggtgaagatggtgatgtaactgccgagattgctcgtcggatccttgaaaactgcaaatagtaattatttcttaaaatagagcgtatcgttctgtttttacgcttcttttgttaatttagcaccttgcttaaattaacaaaagaagctatgtatacaatagaagagttacgcaactgcattaaggcagagttagacaaacaggaatatgtagaagaacctgtttctttgttcgaacctatcaaatacattatggaggatggtggcaaaaggctgcgtccggtgttggctttacttgcttacaatctttatcgggatgatgtggagaaaattttgaaatcagtgataggtattgagattttccataattatacgttattgcatgatgatgtgatggatgatgcagaattacgccgtggacgtcagacagtgcataagaagtggaacagtaatgttgctattttaagtggagatgctgctgcaattacagcttataaaatgattgaatctgtggatgacgagtatttacgtcgtgttattgatggatttaatcaagtggcgatggatgtttgtaaaggtcagcagtatgatatggaatttgaaactcgtgatgatgtgacagagcaggagtatattgatatgatttatctgaaaacttctgtattgattgcaggtagtatccgtcacggagctttggtggcaggagctccggaacatgagtataatgctttatatgacttcggtgggtatttgggattggtatttcaattgcaggatgattatttggatgtgtacggtgatgttgcagaatttgggaaaaaaatcggtggcgatattttaagcaataagaaaacttatatgttaatcaaggcattggagttggccagtccagaagataaagcattgctgaaggaatggattgctaaaaaagagtttgatccacaagaaaaaattaaggctgtaacagaaatatataatcgtacaggaatcaaagaggtggtaatgtctaaaatagatagctacatggcaaagagtcgtgaagctttggctatggtggatgtaccagaggaacggaaggtatatttccgcgagatggtggattacattggcggtcgaaaaaaataaacaatactgaaatagattgattatggaagataatgcaaaacaacggctgttggacgttcgctatttgcgtatggctcgaatttgggcagaaaattcatattgtaaacggcgacaagtgggagcgttgatagtgaaggataaatctattatttctgatggatataacggtactccttctggcttcgagaatatatgtgaagatgagcaggaacgtacgaaaccttatgttttgcatgcagaggcaaatgcgattacaaaagtggcgaaatcaagtaatagcagtgatggtgctactttatatgtaacagcttctccttgtattgagtgtgctaaattgattatccaatcgggtattagacgggtggtttattcagagctataccgttgtagtgatggaattgaattattgaaaaaagccggtgtgaaagttgattttatagaaatagaaaagtaaaaaatatgtataataataagttcagagcgattcttttcccggtgatattggctgtagccgttgtgttgggaatgttgattaatgctgccatgagcaggcaaaaagtacagattccggtagggaaaaatgccatcactccgatgcagggaggaaagttggaccttattttgaacatgattaactattcatatgttgatacggttgatattcataaaatagaggaaaatgcaattcctcatattttaagtgatttggatccacatactgtgtatattccggcaaaagatatgcagcgggtgaatgaggagatggtgggaaattttggtggtataggagtgcagttttataagtatttagatacggtgactgtcgtgaaggtggtgcctggagggccggcagaaaaagcaggattgaaggatggtgaccgtattgtgcgagtaaatgattcgttggtggccggatgtaatatggaaaccgatgctattatgaagttgatgaggggagaagtaggaactgatgtgacgttaacattggctcgcaggggagaagataagccattcaagaaacgtgtagtaaggggaaatattccaattaagagtgttgctgttgcttatatggtagatgatacaacaggcttagtgaaggtaaacacttttggtatgaatacttataatgaatttatgcaatcattggaaaaattatcggcgcaaggaatgaagaaagtgattgttgacttgcgggataatgaggggggaattttgcctatagcaatacagatgattaatgaatttttgcctgagggtagattgattctatatacacaggggaaggctgctcctcgtatggattataattctaatggaaaggggcaatataaagaattgcctttggaggttttgataaatgattttagtgcctctgctagtgaaatttttgctggagctattcaagataacgataggggaatgattgttggaagacgttcatttggtaaggggttggtgcaggagcagcggatattgccagatggttctgctttacggttgactgtcgctcgctattatattccttctggccgttctattcagaagccttatgaccaagggaaagagaaatattacagcgatatttatgagcggattatgcatggagagtttttgcaaaaggatagtattcattttgatgaaaacttaaaattcaagacagtaggtggacgcaccgtttatggtggtggtggtgtaatgccggatgtttttgttccgaatgataccagtggatattctgattatttagtggaagtgagtcgtaaaaaacagttgctttatgaatatacatttgaatttatggataaacatcgtccagaaatgaaaggtatcaagaattataagcaactactaaaatatttagagcaatttgatttggtggatgaaatggctgactatgcggctcgtcatggagtgaaacgggactccaagggtattcgagcttctcggacaatattagaaacaactatcaaagcatttattggtagacatgtgttggatgatgagggctttttcccgatttattatatggatgatataacaataaaaaaagctcttgaggtataatgggaaaaagaagaaaaaaaaacaagactcagagtgggtttaaaatatttttatatctagtaatagtagctttactttttggggtaggctactattattataatgatatagaatatttagggaagacagttgttgaacaggtaaaatctgttgataatacttctgctgacgagataaatatggcagattgtctgccgcagggagacggtgatattgttcggcataaatattatgtattgggctatagtgaggagcatgagcaggcggtttgggtgtattatactccttgtattggaaaaggaaatggaaaagcttcaagaacaaatgatttcagagaagatcctgtagtggaaaccggtagcgcagatccgatagattataagcgaagcggttatgatcggggccatttatgtcctgcgggagatatgactttatcgcaagaggcgatgagtgaaacattttttatgtcgaatatgtcacctcaggtgccaagttttaatcgtggaatctggaagaaattagaagaacaagttcgtatatggggtgctcgagaggtgatttgggttgttactgggcctgtttttaaagatgtgaagggtgaaataggggtaaataaagtaactgtgccagggtattattataaagtagtttattcgccttctagaaaggagatgataggatttattatgccaaatgctcaaagtaaaaaatcaattgtagattatgttgtatcggttgattctgtagaagtatttaccggtcttgatttcttccctcaattgccggattcattggaagattgtctagaggctgcttctaatataaaaagatggtaaattagagaagataatagaatgggcgaacaggcatataagtttcattttgctcctttgcaggggtattcagatcatatttttcgaaatgcttttgagaaatattttggtggtatagatgtttattatacaccttttattagaatagagaaaggtgattttcgtaaacgcgatttgcgggatattggtccggagtttaatcatggtttagaattagtgccgcagattttgccgggtacgcacgatgaattttgtcgtttggtagagatgttgtgtgatagaggatattgtagggtagatgtgaatttaggctgtccgtttcctttggttgcaggtaagaagaaaggtgcaggaatgttgccttatccagagttggtagaagaaatattatgtgcgatgaaagagttctcggatatacagttttcattgaaaatgagattagggtgggaggatgtgaaagagagtctgttattggtggacatgattaattgctttccgttggaacatataacgttgcatgcccgtacgggaagacaacaatataaaggtagtgttcaacttgatgcttttgcagcattttatgaattagtaaaacatcctttattctataatggagatatattgaccattgaggatataaagcgaattttgggtatgtttcctgctttaaaaggcattgctattgggagaggtttacttgcagatccatggctagttgcagcgtataagcaattgaatatcggtgatgaaaagaagcataaggaagttttggctctttttcattatgaattgttttctgcctatgctgccgttttacaaggagatgttcagctgttaagtaagatgaagtctttttgggaatattttttaccgacaacagatcgaaaattattgaagatgataaagaaatctaatcgtatatctcagtacaatgaggctgtgaaattgattttcgggagatgaagaagatattgtatataacggttggagttatttctgttgtattgggaattattgggatttttgttccaggactgccaacaacaccttttttgctgttgagttcttggttgttttacaaaagttctaagagcatgcatgattggttacatcgttcttatttaggaaggtatattcgtcgttacgaaacgcaagaaggggcgagtatattatcaaaagtgatatctttggtgtgcatgtggattatgatatcaatttctgcattctgtttttttgagcatccccatgcccgtatcgtgttaatgatacttggatgtattggaagttattgtgtattgtttgtggttcctaccgcatctaaaaagaaaaaacggctttaaagccgtttttctattaaataacaacgttgataattttctttgggacgataatcattttgcggatttctttgccatctagccatttttttgcatctggtgaagctttgacagcagtctctatctctgcattggttgctgttagaggcatagagagtttgaaacggactttaccattgaatgataccggatattcgaagttatcttctgtaagatatttttcttcccatttaggaaaggttgcagtggtaatgctattggtatgtcctaataaatgccatacttcttctgcaatgtgtggagcataaggagcaatggctattactagaggttcgagaatagcccgtttgttacattttaaagcacctaattcattaacacaaatcatgaaagccggaatagaagtattgaatgagaagttttcaatatcaaattctattttctttagtgttttatgtaatattttcagttcctcttttgtgggagtttcttcgctgactgcaaagttttctccttgaagataaagacgccaaaatttacgaaggaatttataaacaccgtctataccctgggtatcccaaggtttgtgatcctcaagaggcccaaggaacatttcatataggcgtaaggtgtcagcaccgaattgtgctatgatatcatctggattgacaacattgaacatcgattttgacatcttttcaatagcccagccacagatatatttgccgtcttccaagatgaattctgcatttgcaaattcaggcatccaatgtttgaaggcttcaaggtctagaatgtcgttgtgtacaatatttacatcaacatgaatttctgtcgtttcatattgtttttttaagccggcagatacgtatttgttggtacctacaatgcgatatacaaaattagagcgtccttgaatcatcccttggttgataagttttttaaagggctcagattcgcatacgacacctaaatcatataagaacatattccaaaaacgagaataaatcaagtgtccggttgcatgttcggctccgcctaaatataaatctacattacgccaatattggttggcttctttgcctacaagtgttttatcattatgagggtccatgtaacgtaagtaataggcagaggaaccggcaaagcctggcatggtattcaactcaatcgggaaaccttcttttgttgtccagttttttgcacgtcccagtggaggttctccgctttcagtcggtagatatttgtcaatttctggtaattctaatggaagtttagattcgtccatcatgtaaggcattccctctttgtaatataccgggaacggctctccccaatagcgttggcggctgaatatagcatcgcgaaggcgatagttgattttgctttttccgatacctcgcttttcaacttcttcagctataaaacggatagcttcttttacatccattccattaatggctcggctattgatcatctttccttctttcgcatcgtaagagctttcgcttaaatcaatcggttgcccattgtctattacaggaatgatgggtaaattgaatttacgtgcaaaagcatagtctcggctgtcgtgagcaggtactgccatgattgctccggtgccataaccggccaggacatactcactaatccatacgggtatagcttcgtttgtgaatggattgattgcataggatccggaaaaaactcctgtgactgtttttacttcgctttggcgttcgcgttctgttcgctttgcaacataatctaaatactcattgacagcattttcctgttgtggagttgtaagttgtttgacatattcactttctggtgccaataccataaaacttacaccatagatggtgtcagggcgagtggtgaatattttaagttgaatatcagaatcttttacattgaaagtaacatcggctccttgtgaacgtccaatccaattacgttgtatgtcttttaatgattctgaccagtcaacagagttcaacccatcaagtagacgttgggcgtaagcagaaacgcgaagcgaccattggcgcatgtttttctgaacaacggggtagcctccacgaacagacagcccgtctttgacttcatcatttgctaatactgtgcctaattgtggacaccaatttaccatcgtgtctgccagataggcaatacggtagtttaatagtatattttgttgcttttgttcgctcatggccttccattctgcagctgtgaaagttggagtttcagaacaagcggcattaatgtgggcattgccttcagctgtaaaagttgtaaccaattgctctataggttctgctttttgagtgtccttgttaaaccaatggttgaacatttggataaaagcccattgcgtccatttgtaatattgtggattgcaggtacgaacttctcgactccaatcgtaagaaaaaccgattttatctagttgttctcggtaacgagcaatatttttttcagttgtgatagcgggatgttgtcctgtttggatggcatattgttctgcaggcaatccataagcatcgtatcccatagggtggaggacattaaaaccttttaaacgcttgtatctggagtagatatctgatgcaatatatcctagtggatgtcctacgtgtaatccggctccggaagggtacgggaacatgtccagaacataaaatttgggttttgaggaatctacctctactttatacgtttggttttctcgccaatagttttgccacttttgttctatttccttgaagttgtattccatattgtattactttgtattactactgttaggatatattttattgaaaaggtttataaagataaaaaatattagttgacaaagatatgaattttgttgatgttatatagcgaatagaatgaatttaagataatttcgcagtatagttgtagttgcagaatgaacaatattatctttgtaaaaattaaatatcataaatgaagtaatatgacgacagggttaattgcaataatattattagcctattttggtttgttgataattgtcagttttttcactggacgaaaatctgatagcgaaacattttttactggtaatagggcatctccatggtatttggtggcttttgggatgattggagcttcactttccggggtaacttttatttctataccgggcgaagtaggaaatagtgcatggacttatcttcctgtggtattaggaaattgcgtgggatacattgtgatagcaatgctcttattgcctttgttttatcgccttaatttgatttctatttattcgtggttaggtacacgattaggggaaagtgctcgtttaaccggttcgtttttctttattttgtctcagctggtaggagcttcattccgtttgtttttggtcgttggagtattgcaattagttttgtttgattcattgggaataccctttgcagcgactgtttttataacaattggattagtatggatatatacattccgaggaggaatcaagaccattgtgtggacggatgctttgcagacagtgtttatgttgatttctgttatattgacaattgtgattgtttgtcgagaacttgacttgaatgtcgggtctatgatagcgatggtacacggaagcgagttgtctagtatctttgattttgattggcattcggaacataattcgataaaacagtttatcgctggaatagctattacagtagctttgaatggattggaccaaaatatgatgcagaaaaatttgacatgtaaatccgtgcaagcatgccagataaatatgttttctttttctggaatgtttttgttagctaatattttatttttgacattaggtgttttattatatagttatgctgcttgtaatggtattaaattaccttcaaaaacagatgatgtatttgcttttttgacattgaattattttgggttggcagcaggaatttttttcctattaggaattacagctgcggcttattcatcagtggactcttcgttgacagctttgacgacttctttttcaattgattttttaaaattagatcctaaagatagcgggcagcgcgacaagcgtgtttgggttcatgtatttttttcgttattgatgtgtttggttatagtcctttttcgggaattaaatgatagtagtgttataaatacgttgtttaaggctgttggatatacttatgggcctatattggctttatttgcatttggaatgttgacgaggtataatgttaagcagcgttgggtgccattggtttgtatcttgtctccggttttatcatatgttattaattgtaattctgaagaatggttgtgggggtatcattttggttttgaaattcttttgttgaatgcttttatatgttttgttgggctgttttttgtgcgtgttaaagggaaaagcgtggtagggataagttaagttgtattgtgtaatcaaatataaattttcattatgagaactattattattttattgtctttgttggttgtaggattgctaacatcttgccaacagaagaaaaataaagcagccttgactgatcaaaaagtagaaattgcaaaaccttcgtcggaaaaaactgtagagactatttctgaattagaaaaaacagagaaatctgtaaaacaaatgaattattatgtagtagctggttgttttgaatttaaagagaatgcagaacgattgaatcaattgctgatatcaaagggttttaaatcacagatattgccattttataatttaaatatggtgacatatagtggctatgaaacacgggaagaagctcaagctgctttaaatcaaatggtcttacagcctggcaaggaaatgctttgggtgtacccattgaagtagtctaatatatcagcttatggtgcttatatcgaaataagtctgtgtaaaatattttgcaaaaaagatgagctaagcttataaatcaagcttggctcatctagtataaagtaacaccttttataaaataaagtgttcactgatagatctgtgttctacgacattgcggatggtctctgcaaacaaatctgctacagaaatgacacgtattttcgaacattcctgacgctgcggaatcgagtctgtgaatacaacttcgtccaaggcagatttttcaatgttctcgtaagcttttcctgaaagtacggcatgtgttgctactgcacgcacactcttggctcctttttctttcaaaatatctgcagccttacaaatggtgccggcggtgtcaatcatatcatctacaatgacaatatttttatcacggacatcaccgattactttcatatcagccacttcgtttggtctttcgcgagttttgtgacagataatcaagccgctatcaaagaatttagcccacgaattagcacgttttgaaccaccgatgtcgggggaagcaatagccagattttccaatttcagagagcggatgtaaggagccaaaacggttgagccataaagatggtctaccggaatgtcaaagaatccctgaatttggtctgcatgcaagtccatggtcatgatgcggtcaacgccggcagcatgcagaaggtttgctactaattttgcaccgatggctacacgtggacggtcttttcggtcctgacgggcaaagccaaaataaggaattactgcaattactttgtatgctgatgcacgttttgctgcatcaatcatcatcagcaattccatgaggttgtcactgggcgggaaagtcgattgtacaatgaagacatggtcaccacgaactgtttcatcgtaggaagtcgcaaattctccgtcactaaaatgcataaaggtcttttgtccgagttccagattcaatgaatcagaaatcttttcagcaatgtatttgctgttttccccggaaaaaatcttaacttcggaaagatttgacataatttagccgtttcaaatagttatgtatatagtcctttctgtcgacaaaagtaaggaattaattgtgaatagagaattgaaatttgaaatttcttcgatttggcagctttttgttgatttgctttttattttcgactatttccttttatctttataccgtttcaattgtatctatattaattttaaaccaaattataaaacagaatctatgataacgatagagcagtacttggaagaaaataaagaacgttttctgaatgagttgtttgaattgatccgtatcccttcgatatcttcgcaggctgagcataaaccggatatgtataaatgtgcagaaaaatggaaatcattgctgttggcggcaggtgctgaccgtgctgaggtatatgaaactgcaggcaatcctgttacttatggtgagaaaatcattgatccggctttatctaccgttttagtgtacggccatatggatgtaatgcctgttgatccgattgacttgtggcacacagatccttttgaacctgttattaaagacggtaaaatttgggcacgtggagctgatgatgataaaggacagtcttttatgcatgccaaggcatttgaatatatggtagctaccggtactttgaagtgtaatgtgaaatttatgctcgaaggagaggaagaaatcggttctccgagccttcctgaattttgccgcaaatacaaggatatgctgaaagcagatattatcctggtttctgatacaagcatgattgctcatgacactccttctattacaacaggtttgcgtggtttggcttattgggaagtggaaatgaccggcccgaatgcagacttgcactctggtatatttggcggtgccgtagccaatccaatcaatgtattgtgcaagatgattgccgatatgattgatgagcatggacatattacaataccgggattttatgatgacgtcttggaagtaagcgcagaagaaagagctaaaatggctaaagctccgtttgacttggatgcttatcagaaatctttgggaataaaagcagtgcatggagaagagggcttttctacaaatgaacgtaccggaatacgtcctacctttgatgtttgcggtatttggggaggatatacaggagaaggagcaaaaacagtattgccatcagttgcacatgcaaaaatcagcagccgtttggttcccaatcagaaacacgataagatagcaaagatgttcaaagaatattttgagtcgattgctcccgaatatgtgaaattgaaagttgaatatctgcacggaggtccgtcttatgtgtgcccgatagacttgccggcttacaaggctgcagaaaaagcatacgaagaagtatatggtaaacaaccggtgcctgtacgttccggtggaagtattccaatcattgcaacgtttgaagaagtgttaggtatcaaatctattttgatgggctttggcttgggttctgatgctatccactctccgaatgaaaattatccgttggaacaattctttaacggtattcgtacaattccgaaattctataagtattttactgagaaataagcaaaatacagacaatttgaataatgaggtttggaagtttttctttcaaacctctttttataatgtagtgtaaacaaagaagcgagtactctgcttggctgttgggatatggatatgttccttaattgtctgtactcggggaccggttagagttatttcgatttgattttcagtagaatttaatggaacgcgggcataggaaataagataaggcaatgtttgccagttgcgggtatctgctttttcagagagagcgttggcaatgttgacggcaaaacctagccattcattctttttggaagccatttgttttattccttgtttgatggcaacccttaacaatgaggtcgataattctcgtaacatgcgatcgttcaaggttttgaaagctatttgattgatgtcttctgctttttgcaacggataattgatgccgttatattcgatgactccgcgggtaaattgcagtggacgttcttgatatttgggaaatacgacacgtacaatattcacatctgccaatgaattgcggtcggagtcggtatagccgtttccccaaaagaagggtagggcaagtcctaattcctgattttggaatacaattcctccgacacctttatcgattttggtaaaggtaagcccccattcggttttgaccggtccaagcccatttaaccaaaacataaccaactccccgtcttgtgagggtggttgtggtgtgtatttttggtgaaattctttttcatattgggccaattcattggtaaagcccagtttgtgcgctgtacgcagtaaatcctgctttaattgttccggagctgtcagaccgaaatttttggcatagtcgctttggtaaatattgtaggcatttcgataagcgatgaaagcatcgttcgtgttgcctgaggcatcataaatcaaacccattaaaagatgggcaaatgcatcctgttgataccggtttttatggttcggatatttatcgtttaattgttgaagtcggatattgattttgcgggcttctacaagagcgtcttccatgttattcatccggagatagttcatagctttgtagacattaatcataatgacttcaaaatcttccggtcgatagggacgaacttcaggatttgagacgagaactgttgtttctagcagggcattccgtttttgttcttctgtcaatagctctgccgtttcaaaagctttattgctttcttctgtctgccccagcatgaaattgacatatcccagattaaggaaataaagaattttatttttgtcgcgcgattgcttcttgtctttatgtaaaattttccccgcttgctcaaaatttcccatacttacagcttgttggaatgctgcattccgttggtgccaggtggcacatccggaaagtaggaagaaagctgtacataaaacaccaagtagcaatcgcatggcagataaatataattatattattagaaagctcggtcgctgacctgttttttgattttcttgtctcccatccacacgacttcgttggtttcaagattggtgagttccaaatctatctgataatatacgactttatttttcttatatgcatcaacgatgctgttgattgtaccttgcagcatgaaatcggctcccagttccagaccccatttttttgcagtctctgcagaggtatatccctgattttgttgttcgcgctctactcgtaattcctgacgtttttcaccggcttgaactaaacggacactgccgtttttgatgatggctttttcgatgtctttgatgaaagtttctgagctgatgtgttcgtgacttttgttggttacggtgcctacaactactaccgggcgtttgttggcatgttggctttcatatattggcagccagcgggcagtcagtagatcgctgatcatttctgccgacaccaattgcgaatcagtgtcattccagcgtccgctaaggtcgacaacttcatttgagttgattcgtgatactttacggttggcacatccgcttaatactgtggctaatacaaaagccagcatgatggtataaatactctttttcatgatattcttgttttatgttatattattctttttcaatcaaatcctgtgccatacgttggtatgtccttccaataatgatgccgctttgtgaacgaatgccggccatatactcttttaaaggcgacaaacttatcatcacttttttatattcgctcgaagcatgtaataggtggatggttccattgtataggattgcaattcccaaatgggatgtatccaatccggcaatattcgtggtaatcaggatgatatctcctgctttgattttagaatatactttgtcgatatctgatttcggtatgtaataacgggttcgtttgttgatggaatcctccatgtttttgatttttgtcaaaagttggggattgttttttaatgcaggataaagctcatggtgccctgacataaagttgatttcctttgtgtgttttataccgcctaagtcagcagtaatatccttcagcaatagattttgctgcatctcgtatagccagtcggatgaatagtgtaatcgagaggtaaagtcttcgattataccatcccgatagcggattttttgtagattttttttgaatgcatcttcggatgaagaggtgtattcaggtagaaatgcaagagccagtacattgtcaacaaatgtaacgcaatccaattccctgagattgacaatgagcttttccccatcggcagtattcagcgtattacttttgtaaggcgtgtcaaggaaaaagcgggcgatggaagaaatccgctcacctgtctcttgttcctctaaatgatttgtttgtgcataatgccagaatttctgcaacaccagtctgtccgcctcggaaatgacacaagaatcgcacgaggagaaaagacttgtcagtagtatcaaccatatattgcagataaaggccataatatgtgtttgttatgattattttaaaatgtccatcagtttttccagtctgggagccatgatgatttcggtgcgtcggttgcgggcccgtcctgctgctgtatcattattgtcgacaggcatgtattctcctcgcccggatggtacgatttgcaatggattgactccatattccttggttagaatgcggacgacagatgttgctcgtacgacacttaaatcccaattgtctttgaattgaacggttttaatcggttgggtatccgtatgtccctcaattaaaatatcgatatcggtctgttttttcaatacctctgctaattttcccaaggctgtttttccttgtttgttgaccgtagcgcttccggattggaacagcagtttatttgacatggcaacatagaccttgccgtttttttgagtaacgctcagttcgtcactgctgaacccaagaagggcctctttgacgctgttcatcagggttgctgctttttctttttgggcattgatctcgttttgcaggcggtctattttttcttgtagcaaagcattttgtttttcttgagccgacagattggcataaagagattggcgatagtctctcagggcttccctcagtcgtgtggtgtcttgtagcaggtcgttgatttgtttttgtagtttgttgttttcttctttggatttagttaagtcatttttcaaggctttttcacgactgagcgctgccagtctgccgttttctgcgatggtgaatttgtttttgctgacacaggagaatgcaagtgtcataatacagaataaataaataatttttgtcataataccctgttatttgaattgttgttttcggatgcaaacttagcagaaaagtatataataaagccatgttacctcaaaaaatatcaaggcaacatggcttttgttgatttgtgttcgaatttagaaattaactccaacggctatttgccaagtgtttgataaaaagctattgtgttccgctatgatgtatgaaaaatctgcttgtgcaaatttccatttcacgccgcatcccaaagttccgtagcgttgttggtggttgtctttttcgccccaatgatagccaattcgcgccgatacgatatccagtgcagtgtattctcctccgattcctccttcccaataatagtcgggtaataccttacagccgatatccagtgtcccttccagacggtgtttctctgcgaatgtatgagtcagcattcctcctaaagtgactcttgccggttggtcgtatttgtcatagccgtaatcgattttcgtcccgaagttagaggcttgcagaccggcagaccagtaggatttttcgctccagttcagtttttgtcggtagtatatgcccaagtcgaaagccgcagcattggcaacggcatcatcatccatggcactcatgtccgagtgtacaaatcgtgcagtagctccgatggatagttcttctgtcagtttgtgtgcatagcccaagtctatactccagtctttgggagtgaaatttccttgtttgcccaaatcgatttcagcatgcttgaaccagcggaagccagcctgtatgctttgtttgtcgttcagccggtaatatccggctatggcatgtaggtcgttccctgaagtgaggtctctaagccacggagtgaaactgtagcctgcctgcaatttgtagtcggagaatgcagctttggcagcattgcgccatagtgaaaatgctgttgcgcttgaggcagttcctgaatttcccattccgactcctcgcacgtccggtgttgtttccgggaattgagcagcacctgaactcttctgtccgcttgccatgcagcagattgccaaagccccggctgtcaatgtatatttcaatagattcatgagtttagagttttataatgttcttggtaatggttttgttgttgcagcttagttttacggtgtatacgcctccgtcaattcccgacaagtcgactctccccggttgactcagcgagatagttaccgtttgtgtcattactaatgagccggaagcatcaaatacttcgactttggtttttccgctgaaagtcatacttgcccagatggtcaattcattgggtgaagtcatttgtacttcggcttcttttttgttttccggtagcagacggattttgaaattcatttcctgcgaagcgccatctttgtctgtgacggtcaatgtgattgtatattcacccgattggcagtttttgttttccaatgccagtatgattttgtcgccttcttttgtatctgtgacaataccgcaactgtcgtcattgacggtataggttaagtcagaaccgtccttgcggtcgtttacagtgaatacatattcgattttttcaccgtatgtcatgattttgacaccctcgattggcttctccgcagtaatgtctggcgggaagttgtctgccagtgccagtttcgcattgatgcatccggctcccagtttgcctttgtatttgggattatattcatcaataggaacacagccttttatcagtcggtagatgacatcatctgccgtcagaccggagtctttcccgccgtattttgagataatcaaggctgcaacgccgcttacgcatggggctgccatggacgtaccgttcatgtctccgtattgtcctcccgggaatgtactgaatattgcccagtccgtaccacctccgaatgcagacatgtctacccagtccgcatagttggaggtagaggcttttgtgtagtcaaaaccgatgttcgctactccgataacattgtcgcatgaagatggaaaatggtctttcatttcaacaccctcattgccggcagaggctacgaaaataccaccgcgtacgggaccggtctggttgcctttttcgtctgttccggcatgttctacaaaatagttgatggcgtcttgtaatgcggcccaagtaccttcgcctccccaactgttgttacagatgacagctccatggtcggcagcatagacgattccttgcaatacttctcctgaactgaaggatgaggtcataaagcggattccgttgttttttgcgtcaccgccggcaataccgcataccccctctttgttattgtttttggcagctacgataccggctacgtgtgttccgtgaggtgaaccatagtctatggaactaaggttggtattgtatccgaaccagtcacccacatatccgttgccgtcattgtctttggtcgggtctttgccgtattcgccttcgttgatccatacgttgtctttgaggtctggatgttctacgtctacaatgttatctatgaaagatacgataacatctttttttcctttttctatttgccatgcttccacgacattcagatcggcacctttgattttgccgtcaccgcccggattgtacaggtggtattgcaggttgattcttgggtcatcgtatggaaatccgtcaggtttggcgtttggtgaaataaccggtacgccttctgcctgggttactccgctgatatcagagaatgattttatggcagtctgtggtttgattcctttatcgaaagtgacgtgataccatagatgcagaccggcttttctgtggcgggcttcgaatttccccgcaggaggaaacactctcttcatactggtcagaccgattttacgtgcagctgcatccagttccggattaccggtctcgatttcgcctgcacgagtggttagcacgtgcagatcttgtggcatctcttcgaattttaccatcatttgtcctttttccaaggcaggtgccgccgggactacagaaaaatcgtctttagggacgactgtcgagagatcattgttctgacatcctgcaagagccagcagcattaaggggtatattagtttgaatttcataatcacatggtttattttaaattttcaatgaatgagaaacagatgtctgcaatgttaccgaagtctttaaaaactttggttttcgcagtttcgatatcaccgccgttggttaacaccacttcgtgcagttctccgttattgccattgttcaccaccattgccagacagttgcagtcatgtttgtctgcaagtgagtgtgggtggtttaccctgaatttcatcatggaaatggtggctcctgcatcatataattcagtggtttcaccgcttttgaaattcagacggaataatttggaatccagtgtgtagaatatctgaccgttcagattggtcagtgccgggttggctgcaaattgcgaattttcatctgcttccagttccggtagcatgtattccttgaatttgtcgcttgatacaaaatcatagatgtagtatatcccattgtcgtctttcattagcatcatacctacggcttctttctctggagaggtggaagctcctatccatacggggatcttgttgctgaatgtcctttcatccggataggggataagttcattgtaggaagttgcaatcagtactctgttgttgttgccgtcccatgccagcattgaaccgtcttcgttgaattccccgaccattcctattttatagtagggatcatcgttgttgatgtagctttcgtatcgattcccttcccaacatttgtatattctgttgttgcttgctagcaatagggtgtttatagagttgctggtgccgtttcgcccatatagaaggctgacattattttcataaatctcggaaggtagcaattgttcgttggatgcgattactttaagttcgcttggacgcatcatccagatactgtctttggctaatatttgcaaggttgcttcgcgtcccaatagggatggggcatatataaagccggtggcatcctggaatctgcgtggccgtcctaaatctgcgtatgcatctttcgtaaaaagatattgagtggaatccgggtcttctatagttgaaatataccggtctccttcagtgccgttgagtacgaaccaagaattgcggtaaggctgtactgtgtttacagacagccgtttgtagtggctgacattggttgttaagtctgtcagttggaatatcacgttatatgaagtggactgtgcaggagggaataccagcgttaattccttgctgtaaatggagtccgtaacctcttccttattcttgttatatgctactttccatttccattccaggttggtggtgtcgtctcctcgtaaactttggctcacttccggaatgtaggtgacaatcagcgtatcgtttgaagacggttgcttgtaccggcagataccgttctcccctacgggcaggacgcgtcctttgttgtctttggctgtcagagtaaaggaaatctcattgatgtctttataatcataattgcctttgtcttcatagcatccgagcaatcctcctaagaggattgacggaatgagtattgagagtgatttcttcatgtttttcacatttatttttgttattcaaacgtaaaaggttcaggattggcggctttgtatgtctccatgaattctttgtagaattgtttgtgcatatcagccagccagcttgatgtcagccctttgaaagtatctggatccggaagccagtattgggtcttcaagtgatagaggttgatgaatacgaatttggattcgctccatgctccgaattgcggacaattgtcccaaaattccggtttgatagcggcagggaattcaatgtctttgggagcatccggattgattgccagttcatagcgcaatatcggtccccatgctgcgaaattactccattcttgacagtcgtcccatcctgctatttttgtctgtgtcgctcttatgaaatcctctttttctgatgaatattcaccgagatacttgtcgttccaccaaatcggggctacattcccaccgccgggatagtccgtgatggcattgtcaggatgagtttcattgtagtcggctatagcattgacgatatagggattcctttcagatacccaatatcggttgcctgtaagcaggtcgttgatatcgtatctgccgttgtcctcgatgttccgttgtagaagggtggttacaataatgtcctgtttggtttctgaccatggaccgaacatatcggcgaattcattccaccattccggttctccgctatgaccgaactcgtatttcaacggatctttcggattttcttgattgtatcggtccatttccattcttaatacagaagctgcaaatgtccaagtgtcatcattcggttgatatcctgtcatcgggaaaagatgcaggataacaaattcctgtttttcgatagaccaatcgttgcctaacacctgatcgttccaccagcctgccttttcttcgaatttcgggaatgtgaaatctttcttctcttcttctgcccgttgtctgaagataaggttccaatagtatagcttgctgttattgccgaagttttcgtctttatcgccttctttactgattacttctttgatgaacgcatgtttctcttccgaaaattctcccagcagggcaagttgcatatcccaccataccggtttggttgtttcggggaacgtgaattttttttggtcttccggtgctgcattctcgttgaatcgttttaaagcatagcgcagttccagattgtaccggtctgtattattccacatgtaattgttgtttcgggagaaaatatcctgcgaatgtgtcaccataaaggcatatttctcttcatcaaattcacctaggtattcttcccggtatttccagtcttccggttcttcataggtgtttttcagttcgatttccagtacggacagttccttggctccttgaacgaagaaaccgtcactgtcggtggtgtctaccgtaataccgattttatagatacctcttgctttggggcgtaggacagtgaatgaaatcgtatcaagcagttgattaggtgccagactgtaataggaatcaaatatcacttctgcctgtttggtggaatcctgaccttccagaaggacggtcgtcagtttgtagggtcgttcgtccggtgtcgggaagccttgcagttctacgatgactttctcgaatttgtatctgccgagagagtctccgtaatagcggaggttatttttgctgtctgtgtaggttgccatggcgaaattgaatgatttctccgttgtcaatcccttgtccgggtctgtatggaattgaagcccgtccttgtcttcggaataccataccagttccttttccgagcaggcgaacattccgaacagtaatagtaggaaaaatatatttttcatgttattttttaatttacatgtaatattatgggcaattagatgccatattctatttcgtcttccggtgtcggcaaaatgtagtaaatcatcttttccaccggacagcggtagaaggtggagcaattgtgtcgtttcaggaagtagaaccattgaccttccgcaaagaattctttctgatattctttgttcaggatgttttcgcgtttttctttgttgtacgaagcgtctgcttttatgtcatagcttttgggtattccccgctcgtgccgtacggtgttgataaggttaacgctgttctccagactaccgcattccgctataattagatacatttcaaccaatcggataagcggcaccttctctttgtattcagcctctttaccgagatatttgcggcaaagcagtccgttggtgccgtgtatgaatccccagccgttgctatagcggatgtcggaataaccgatggtttcggtttcaaatacatctgtggcattttgcggggatatatacaattcgttggcaaaggttgttttctctgcccagtcgcttttaagtttttcttccatgtcatccatacccagagcgaagatggtttcattgaacatggatacgtcctgttggttgttgctggagagttccagtccgcaactgtcaatgacagcctgtgcttcttttactgcctcttcattctttccaatccattgataaacccttgccttcagtgcctttacagcccatttgttcatatagtgtctgcggacggtctgttcttcacttcctgtcagtggtttctctgaagccagaaggttttctgcctcgttgaggtcccggaggatatagccggcaatttcattggcaggcagcagagtcttccggtcatcgtcaaaacggtctctccacggcagacagcgcatggtggaatcttctttgtaaatcggtccgtacagacgcaataaatcaaaataatggaaagcgcgcagtcccaaagcttcgcctttcatggtcttccataaggattcactgacaagctcacgtccttcattgtccagacggaacaataactcattggcgttagcgatagtcttgaacagttccaaccacagattcttgaccatgtcttttgcatctgtgttgttcttgtagtcgtatctttgtgcccgttcgttgtctgtggggacgttgctaccatagttgtcgtaccgttgtaccaattcttctatttttctgtacgtcatgtctttcccgtatgtcttttccagtgtcatacgggtgtacagtccgattctggcttgttggaatccgatttcgttgataaacattttgtctgcttcaacctcttctttggaggatacattcacccaatcggagcaggaagacagtaacaatgccgttgagatgcagattcctgatataatgtgtttcattgtacgtttcttttaattaaataaaatcgataaagacaggttgaatgtccttgcaaacggatattctgtaccgcgttcctgtttgatggatgaaattcgtcctaaatcctgcatggaagcatccaatgacagattggaaattttgcatgcttcgaggaatctgaattgtttggcttcaaaacggtagccgacagacagcgaactgaatacgaattcgttgttcttttgcaggaaacgtgtactcatgggagtctggtggttaatcagttggatacctttgtatttcgcatatcggttgttcggactccagcgatcatttcctcctgcacggcggtctacgttagagctgatatcgatgttttcgattttgtctaccaatgtctggttgaatttgtctgcaccgaactggaaggaacaggacagggtcgctgacaggtttttccaatggaacgatgtattgatagaaccgcgtacgtccggttctgtgtctccgacttttatcttgtcattgggatcccatacgaaagtacggctgccgtcacgttttaggaacagttccttgccggttgccgggtcgataccaagagaaggcactagttttaatatggatgtggattcgccctcttcgtagataggaaggatttccttgtcgtttttcaagttatcttcgttcatctttttcaattcattggacaaatccttgatgacgttcttgttgtgtgtggcattaactcctaacgaccattggatgccccgttcgtaatcgttgataagcagaccgttcaggtcgaggtctataccttcgttcaatacggcacctacgtttcttgttacactttcaaatcctgaagatggctgtacgttgttttccaacagcatttcatccgtgtagttgtggtagtaagaaatcgtgaagttcaggcggctttcccataagccgagttctgcgctgacactcttgcctaaagtcttggaccagcccaaatccggattaccgatacccatcagttgtgctcccaatacgtttgctccaggataggggaacattttttcgtcaaagacgaacgaataggttttttgagcttgatggctgtcgtaactttgagaaccggtcactccgatactggcataaagagacaggttggaaacaatggtattttcaagccatttttcacggctcatgttccagcgggcaccgacagaccagaaaggagccatttttgtatgcgcaccgaattgagaggacaggtctccgcgaaggttgaagtctacggagtaacgggaatcgtacatatagctgatagaacccaatacgcctacactgcgggtggtggattcagcaccgctggcacgttcgtccatttcgaatgcaaacaggaagtctgtcatgttgtcgttcggaaaacctttggcatgcaggtctgtaccatcacttttggaggtttcgatattccatctggcggaagcgaaaagaccatgtttctctttcacccagttgtaggtgatggatgcgttggcactccagcccacggattctcccgtgcttttatgatattctcctcgctctgccaatggtacatcatttgcttcgtatttggtatggtttgccgaggtgaatttttcagcgcgggcatggctcttggtgaatgacaattgtccttggatacgcagattgtccattactgcatattccaaagcgaagttgtctgtgatattgaagttcttattgaaatccttatgcgggaactgtacattatacagcggattggtgatggtggcagccgtatttcctgcaccggtctgtttggtctcaatcactttttggtatttaccgttttcgtctgttatgcgatagtatgggttcattcttgcataagtatggaattctccgtagggggaattctttccttctgtattggtcatgttcagtgagttgctgatgttccatttgtcgcggcgataggaaagagtcaggtctatacccatgttgttacggtcggaacctttcatgacaccgaaatcatcgctgtagttcagtcccagactgtaacggatggcatcatcacctccgtccatgctgagggtatggcggtgggtaatggcagtgcgtaagggttgtgacagccaatatgtgtctactccacgtaaaatctcttctttcttttggttgtaatagtttaattggtctacagaattgaacagaccggcagcccgttcgtattccagtttttcagaggcattcatcagattgtagtcggataaatccggcacggaaataccgatatttcccccataacttaatgtcaatgcacctgctttcggttttttggtttcaaaaatcagtacaccgttggatgcttttgaaccatagagggcggtaccggcggcatctttcaatatggtgatggattctacacgttccgggtcgaggtcaacgattttttgcagggtggtctcgaaaccgtccaaaatgaacaatggcatattggggcggttggagtagtctcccatcatcatctgaaagtcggtggctttgttgcttcccaattgtacgtcaccacgcagacggaattccggcagggcgttcgggtcggaaccgcgggcgttgttttccatgatgtggaaactcgggtcgaaagcctgaagtgcctgcaatagattattcggattcatgcgcttcagttcgtcgcctttgacagtgacatagcgtccggtaaagccggaagccttacggggtgccataccagttacgacaacgccttccaattcggtagtctccggttcaagacgtaccaccaagtctttgatgtctttaccctcaacggggatggctttttccttgtagccgataaatgaaatcagcaaagtggtcactcctttgggtacatcaatggaaaagtttccgtcaatatccgtaacaactccgataccttttgattctttcagaacgatgtttgctcccggcaacgcttctccggtcgcatcatccaaaacccgtcccgtgacatggcaaatgtcttgggattgtgcctgtaatgtcttgttttgcttggcataaacaaatatgcttcccgatgcttgcccttcggtcagggtaagcgtcagaaaacatacacagcaaagcaatttactaatgattttcatcaaattcattttttctttaatatatttttaatgtaattggttatttggctttattggacaggaattttttgacagtcttgtgcaaatcttcgcctcttaaatccaatgcggcaaccttgccttccgggtcgaccagtacggtaaagggtactccctgtatattgcattgttttacagtctctgtttcccatgaaaggaaatcgcatacttgaatccatttcattttatttttttcaatggctttcaaccaggcatctttgtttttgtccagtgatattccgacaatttcaaagtttttccctttgcattctttgtagagctgtacaacgtttggcaattctctcaggcagggcccgcaccaggaagcccagaagtcaaccagtacatatttccctctcaagctgcttaatttgaatgttttgccgtttttgtcaggcagttcgaaatcgggcatttcgcttcctaccttgaaatcagccagacggataaattcgtccaattgtttggtgtacgggtggttctgtaggctggagtcaacttttgcccttaattctttcagttcgttcaatgaaacatttgccttcatttcccaaaagatgatgaaaggagcgatgacttgatccggatagttctttacgatttcatattgcatttgcaatgttcggttattgagaaagtcagtacgtgccttgaatagtttttctctctcttccggtgtctccgagcgctttaaaagcatgtcgatggtgctggcgcgacgcagactgtcgttataaaatttgatagtggcattgtaatcattgaaaatctcattgttgatggttcctgtcacggtagaattcaagaaataagaagcattggcttttataaagacttctcctttctccacccaaaaaggagtaatgggactcaaacattccggatctccgcttttgataaagaacattttcggttctccgcaatttttgacagtaaacgtataacaattgtcaactacggtgcaactgtctatagcccaagatgctccattgatttctttttcttcgtatagatacacttttttacctttgtaggtcccttccaattttccatgtatgacacagtcattgtttgatgcagtgttttgtgcgaacacttgggtcatgtgcatgagtacacataacatagttaacattcttttcatgcttatcttgcttttgtgaattattatgaaacatttttataataatacgcatgattaaagaaagagggggtgtgctatttgaaaaaatgtttgttttttttgcggaaaataaaaagcaggcaagatttgtgatggttgtcttgcctgcttcgggtggttgtcttgcaatgattattcttccagtttgcttatttgattgacaaattctttagcgggtttgaatgccggaatattgtgagccggaataattaccgcagtgttttttgtgatgttgcgggcaagtttttccgcacgttgctttatgataaaactaccgaaccctcttaaatatacatttttatcgtttatcagtgcttcctttaccttcatcatgaaacattccacaattgccagtacctctttttcttcacatccggtctgctcggatattcttttacataattctgcttttgtcattgtctgtagattttaaaatacacaaaaataagcaattggattcaattattcattcatccggtctgtttttgtgcaattggttttgctattatttgtcttgtgcatttccttgatgttgctctcatgtcccttttgttcttatccgtagctgacggcaacctcctccgttgttcatcgcttcttgttcggataagcttcgggggaacttcggaggaggaacggggaaaggtgagacataagtgagacatcggtgagacatgcgtaaaaggtcaaagggagagctttcggagtcccttttcggagaattgaaattgttttattctgtcaatacaaatcaatttattttgcattattcgataatagttttttgaatagtaatcgtttggcaatgtatgaaatgacgtaagtgaatatacttaaaagatgatatttggcatatatgtcaattatttgataagattatcatagaaatatactactttagccaaaactttgagtatatttgtagaagtaacaataaaaatgacgatatgagcaacgatattaatcgcttgaaagtggtgcttgcagagaaaaaacgcaccaacaaatggttggcagaacagcttggtaaggaccagggaacagtctctaaatggtgcactaatactttgcaacctaatctcgaaactctggttcagattgccaaggttcttgatgtagatacaaaggatttattgtggtccataaagtaattcaataccatcatggataagaagcaacaagacattgcatattttattgcttttagcattgagcaatataaaaatgcaaaaggtatgagtggcgaagaagtcatgcaactatttaacagatatagagttctggaatatttgcaggatttctttgatgtattgcatacacaagggtatcaatggattatcaatgatattgaccaatttataaacctaagaaaacaggaggagcagaaatgaaaatatatcatggtagtgtagatgtggtgagtaatcctgaaatcagagaacctaatcgtcgtcttgattatggtgcaggtttttatgcaacaacatcatacgaacaggcagagcgttgggtacaacgtaaaatgagagaatgtaaatctgggaaaggttttataaatgtatatgattttgatggaaaagtgatggatacgttgaagtctctgtcattcacaacaccaacagaagaatgggttgattttgtgatgttgaatagaacggagcaagattatattcatgattatgatattgtgtatggtcctgtagctaatgaccgagtatatgctgcatttgcgttatacgaagctcacctcatcagcaaacagatacttatagcagaattgaagacctataagttggtagaccaatatctttttcatactgagagatcacttgaaagtataacatttattgaggcaaaggaggttacattatgataggcgaaattaatcaaagtaatctatatctacttataccctcaaaggtaagttggcttgctgatatgctttgcaaaaataaggcaatgagtcttgttgaagctatcaagaaaatatactcatccaaactatacaaaaaacttcaggatgagagtacaaagaaatggcatcttggtccagtggatttgtatcaggaattgatgaatgaaaaatagataattgtttgccagttgagccattaagtgaatcattaaaatcaatggaacaacaaggctaaaaaaactggtgaacatatgctgatagagtttggtaaaactatatttatttatagatatattaaatcataaaagatgagatatttagggagtaaggaatctcttacaaatcagatattagaattacttagaagcaaaggtctattgtagaatgattatgtgttctgtgacggtttttgcggtatgggatctattgctgattccgtaaaaaacatatataggaaaattatcatcaacgattcacttaaatgcgcttctgttttcacacatgctaagttgattgcaaatgaatgtactttcgaaatgctgggctttgatcctttcgaattcctaaacaactgcgatggatttagagaaggttttgtttatcagaactattctccaggagtatctgatcgcatgtatttcaccaaagaaaatgcgggacgtattgattattttagagatcaaattgagaaatggtatgtgtcaaatgatataaacaacaatgaatattcttatttgttagcctgcctgcttgaatcagtttctgacgtatcgaatacagctggggtgtatggtgccttccttaaacattgggataaaagagcactcaagcctattgtgttcagtagaatagatgcttcattaggtatagctaacgaagttgaagtctataattcgaagattgaggatataatctcgaatattgattgtgacatactataccttgatccaccatatactcaaaaccaatatggtacgcaataccatttattggaaacactcgtcttaaacgacacaccaacaattagtaggattacagggtctcgtcccactacaccaatgcgctcacaatggtcaaagaactattgtgcccatgttctttttgataaagtcgttgctgaaacaaaggccaaatatattgtcttcagctataataatgatggatttatgtcgaaagactttattgagaccaccctgaaacggtatggagttgaggaaagttacatatgcgaaattattaattataaaaaatataataacttcaagtgccaaggcgctgatgatcattttgaatttttgttctttatagaaaaaaaaacttccgactctattgtcataaagtctccattgaattatactggtagtaaatccaaaatggttggatttatcaagagtcagttaccttctggcaatatagatactttcattgatgcttttggtggcggattcaatgtaggagtaaacatcgacgcaaataaaatcatatataatgatatcaatccgtttgtggaaggactaattcgttctttctatagcgaaccatgctcgtatttacaatacatcgaaaaacaaattgagaaagttttaaaataaaatattgtgatatggattgtaaaatattgattaatagaaatattattaatattctcatcggagatgagaaagtatgtgaagaatatagacttccatatttatctggtcctgatttgtgtgctttatctacagaattcggtttacaaaaatcttattcctggaatggaggtggagtgagtagatgggtgtatatgcaggatttaatgacatatttagaaaagcaaggtcgattatttgaattattttctagattgtttgatagacaatattttaaagaattatctaaactaacatctccagaattagtgacatcaacatataattcaatagtggattgtgctataaaacgaattaatgctaatcttatacttgctaaaaaagaattaagagttcataaaggtcagttcacattgacagatgctggaacagaaccagtatttatagctcctaaggtaaaagttgtggatagacaatatatacgtgaattaccagaacgaataaaagatgatcttgaacataaggattatgatagtgtcattacaaagtctaggactcttttagaagaagtcttaatttttataattgaaagattgactaaagaacgatataagagtaacggcgatctagttaagatttatcaagaaactacggatttgctaaatatgcgacaaaaaggcgattgggacaaacgtgtaaatgaattattaggaggaatgcataaaatagttagtgccatagcaagtatgagaaacttgaatagtgatgctcatggtgcaggtgctggaagaattaatattcgtgaaagagaagctcttttagcagcaaattcgtctatgatgcttgcagaatattggctggcagtttatgaaacaaaagctaaataataacaatataataggtttcttgaggatgtaaattaaactcatagggggttgtaactcaatatcgttgttttctattagttcggtaatagtttgtcgaacaacgtcccatgtgtgagtattttcatattctttgtaggggtgttccatattttttagaattaaattcatttatcgatttcaattgcatacatcacaaatttacaaaatatgccattcattagtttgtgatgaacagtatttttttgtgattctttgcttagttattcttgtttggctttactctttatgacaggaatgttaaagaaaccattttggaaggtgaaggtgtatctgtcaccaatttcagcttgcttgtagaagtcgttgccaaaatcaaacgttcttactccaagctctttattttcaaaatgaaattctacatcaaaatgaatccctgctctataaagagagctgaaatctttgttaagtatggttgctgattcattgtaatatttatgctcggacggaatatagtaattcgctatttcaacaccaaagactagcaacacacctattatcaatcccattgccgaatgtataaaagaatagaaaatagcacccaagtattctttccaattccatatgatttctttatctcgaataagccgtataataccaacagccaacccgattgtggcacagagaatataccaccaccatccaacctcaaacagagtattttgatttatttttattccccattggcagaagaagaggattggcaagagaagccaccaagacaagtaattggaagtattctctgatgattctacttttttacggcattttattgcacttccctttttcgtacgtcgtttatgcatggtttctatttctctttgatttgtttacaaatttataaaataatgccattcattagcctataatgaacagcatagatggttttttgttatgaatagagattcatgattataattgaacaatgaatatgttcattttatattccaaaacattaaattgataattccatacggattcctctatttcaagaatttgttcaggagtgctatttgaaatatgctttttgatacaacttttttccgtcttattatagaaatgccacgaaagatattttgcccaaaatagcattgcatcaaatggacttgttgcatcaacttttctcacaaatgttcctcctctatataatacaacaaaaatatactcatagttttcttcatgacttgagaacttgtgctcgataatatgtgattctattcttttgccatttaccttcatgtatatatagctcactccttttatgttctttaatcggcagggacatatttctttagctgtaatcattcttttaatattcaaaatagaagctctacctatatatggaaactgaatactattaacccagcatatttcagcttgttccaaattgtcagatagaatatttttagctgtcgaaagtattccgtcctcgtagtcagttataaaagtatatcgtttcatacgctttacccgtttaaaaaaatgatttcagcctattgtctggatgctatatttctaaaacacctttatcccattcttgtagagtcattttagctagataattcgataatcggtttcgttacctatttttcttgttcttttttgcaataccgtttaagacatatgtttaacaagttgcaaatctcttttcctttcattgtcaagttgtgagcaggaatattttctatagccccagttaccttgaaattatagcttatcaggttctgcttaaaatcggaagattcttttactttatgtatcaacggggtatttttataatcaatggctatcattttagaggaatagagactgataagccgaaaatttctcacatcagtaaaataaatgttataataactccctttgcactgtttgtataattcaagtctgtcttcatgaattattaaaaatgggatatgacgaattctgttgtatagagtcgtgatggtaagaaataatccgcccccgccgaagaaaatggcagagcaccaacctcctagaatttttgttactgaattacaataataatctcttataatcatacatccgcccacagcaaaagcgaagcagccaatagctaaaaacatatttttccataagctttggtagatttttatttcttttttagttgattcattatcagttggtttcatggttttaagtgtttatttcctaatcttctcagtcgaagatagatttctgcaaatatatcctatgacgtattctataggggtttgtagctcaatatcgttgttttctaccagctcggttattgcttgttccacaacgctccatgttggggtattttcatattctttgtaggggtgttccatatttttagaattaaattcatttatcgatttcaattgcatgcattacaaatttacaaaaaaaataaatagtatttgaatgcttggaattctattatatatttttgtagtaatcaaaatttgaagatgtaatatgctgtgggcacttatttccttgacaaagtgcaggaaaacggaatgagaagatagaaattggataatatctttgtatgttgcaagaaaatattattattgaatgacactatctgttatttgaaaataaatcattaactttgcggtgtaaatgatataacataatgtgtaagccaaaaacagtcatctgatagatatatcttttaagaataaaaaactggaaaagattgcatccgaccccaagaaatgtcttaaggaatttggcaagataagatcagacttgtttctgttacgagtccgagacttatatagagccgaggtattagaggatgtccgttatcttcccggaaactaccatgagttgaaaggagacagaaaaggacaatgggcgtgcgatcttgaccaaccatataggctgatatttgaaccacacgaagatcctattccgacagatgataacggcaagtatatttggatagagattaaaggagtggaaatagtcgaaataataaattatcacggtaaatagtatagtattatggcaactttaaagaaattcgttccgccggtggaatttcatcccggcatcaccctttcggagaaactgaaagagatggggatgagcgtaaaggagtttgctgtgcgcacttctaaaccggaaaagacaatttttgctgtcattggtggcaaaagtagtgtaacttctgatatggcggtggcttttgagagtgtcaccaagattcctgcgcatttttggctgaatatacaacgtgggtatgatgaatacattgcacgccaaaagagggaagaacagctttcctcagcatttgagtgggcgcgttcttttcctttagctaaaatgatggaattcgggtggattcctgtagtcaagaccgttgaggaaaaggtaaaggccctattgtctttctttcaagtcagcaccgaaaaggcatgggaagattattacctcaatcagcagttaaaggtggctttccgtatctcccttaacaacaccaaagagccgcatgccatatcggcatggttgcgacaaggagagatacaggcagcggaaatgggtgtaaatgaattttcggagaaggcgttgcgtgaagctatcccggtgatgaaagagctttgcgtcagacagcctgccgactttgctcatgcgctccaaaaggcgtgtgcgaaagtcggtgtcaaattggtttacacgccttgtctacctaaagcgcctattaatggttccacaagatggataaatgatgtgccctgcattcagatgacagaccgacataagcgaaacgatgtgttttggtttacattctttcatgaattaggacatattctgctgcatgggaaaaaggatatattcttggaggacattgaatatgccgacaagcagaaagaaaaagaagaagaggcggatgttttctcttcccgcattctgctatcgcaggcggcggagaatgagattacgcgaaatggaaaattttctgaggcagccatcagaaactatgcggaaaagttcaatgttcatccgggtattatcgttgggagattacagcataagaaatatatctcatttacagctctttcaggcctgatagaaaagatagaacttttcaactgaaatatcatcggttgcatggtctttctcattgttcagaatgttcacggtaaacgaatgccggcttatatgtttgtctattccgattctttttatccaatgcttaaccgatttgcagcagtttttcgtatttgctgttctctctgaaagtttgtaagagcggaaaaaatgtataactttgttatctcaataagactaaaaggagcatactcacttaaaatttataattatgttatttacagtaaatcctgaaattaatttgagctttggtcaagtgcttgaaaagttgattaattttgcatttgatgcaggtaaagacattctggttgctattctgatttatgccgtcgggcgtatcattatcaagtatattggtaaattggttgccaaaatattggaaaagcggcatgtggaaatcagtgtgcagacttttttgaagagccttttaaagattttgttgaatctgattctggcatttgccattattggtaagttgggagttgagacaaccagtttcgctgctctgttggcatctgccggtgtggctgtcggtatggcgttgtccggtaacctgtctaactttgccggaggattgatagttttggtattcaaaccctttaaagtgggagactatatagacggagccggtgtgagcggtacggtgcaggagatacagattttccatacgattttgttgactcctgacaataaggtggtttatgctccgaatggtgcattgagcggcaatgcaatcacaaactatagcagaaaagacacccgacgggttgattttacatttggagtggaatataatgaggattttgataaggtaaaggcagtgttgatgaggattatagaagctgacaaacgtattttgaaaactccggaaccgatgattgctttgggctctttgggtgcaagcagtgtggatatcacggtgcgtgtttgggtggctactcctgattattggggcgtatattttgatatgaatcaaattgtatatgcaaccttcaacaaagagggtatcggatttcctttcccgcagcttacattgcatcaggctggaaattgatgtttagttgatattcagatatgtaaagtccctgtcgaaaatgtcggcagggactttttctatagaagttttaaaaacaattctttgttatcggaatctgaagatttgatttgtaatttgagacgtgatttgcgggtatagacattcgtgatgttgtttttcatgaacagactgattacttgtggggaaaaacctgcaaatacataacagagcagctgtatgtcgctttctttcatgccaggaaaatcattttttaatttcatcatggcattgtcgtggcaaagatttacaattgtttccaattcctgtcgcattttcggattttctgaaaactctaggataatctgttttacttgttggaacatgttggtttgctggatagccgtattctctttttcgtagtatttcctgccgagtttttcgattaattcaaatcgtgatgcgactagtccttttaaacggctttccatgtcttgccgttcaatcagattgtctgtgagtcttttgtattctatgccggctttttcgcttaatagcaggtaatggtttgtgcgttctcgctgtatgtgtatgaagcgtcgtataataaaacaagtggtaatgattgatacaacaatgataaccgatatgattatttcccaaaagtttcggatttccatccggtattttgcaagttctgcctgtttttttaaatattcccgttcaaccatgcctgctgagaactgtatttcgctatgtgttaatgagtctgtcaaggtaatgtagcgatggattctgtctattgcatcttgcaattgttcggtctgggtgtttattttgaaggcaacgtattgtaagtatgccatgtcgaaaggattgttgctgtgactttctgcgagattcagataatgtctggcactgtcgatattattccttatgacatttatattcatgagtgtttgatatttgtataaagaatcgttccttgcatatttttctatgcgttccagcaatgctggaggaatgttttttctgtctgttataacataaagagaggacaggttattcatagctgtttgtgcggtttctttgatattttgttcgtcggacaaatgcagggcagtggagtaaagttttatagccttggagatgtttttcattcgataagttgctgctgccatgtctagaattgcatatatttcttctgttgaggcatttgctttttgcaaaaagtctcgcgattgctgaaaatagagaaaagctctgttgtagttcatctgttcataataaactttccttatttgtttgtgcaataagcccaagcctttatagttcggttcagatgttcgttccagcatttcatctattatcagaaacaatcgtaaagcctccagttggttgtttgcattcaatttgatttttccccggtagaacaaggtcttgcattggttggccatgtcgtgagaagaattcttgtaataattccaggcttggagaatcagcgagtcgtctgttaccttgatgttgtttttatccaaggcttccgaatacatcaaggcatacttggcatagtccttgggattaagtgatgccggttgaatctgttttaatatgtataaggcactatccggtttatgaagcaataattgttctgcttcatcaagctgtaaattattattctttttgcatccgaggaggcaaaagagaaatgtgaatattaaaatcaattcatgtttcatggcttaaatatcgcaaaaactttcatatttccatgcatgtaagatgagtgtaagaaaataaagatgactatgtttgtaatatacttgtaatctttgtgttatgaatgctgttgtaagattatatagtgcatattataactcttgatagcctgaaatgtattttatttgcagcataatattttcacttataaaaacatgaaaaaatttttattttattattttttattccatgttcgcttttgggacaagatataacaaggtttgaagtcgaggttgcaataggtcctaattttggaaagaagaaggtggaaggttgtaatattcgagaaggaattgatataattttggaagcgaggtgtaattattcttcccattttgattttggattgcagtttttggtaggagcttatgatttgttgtataaaggaagaggtgttgaagagacttatcggaatatgatattacagcctgtggttgactataattttcgtatgggcaaacatgtctcttcatttgttggtggaggattgggaatggcgattgttgatgttgatttggggtataattagtttaattccatctgttttacacctcgtttaggggttgaattattcaaacacttaaggatgacacttgattacaggttgttgaagtgggatttaagtttttggaattgcagtgtcggatttgtgttggggggaggaaataagactcggagacaccattagccgtttgtctatttcttcgagagtagattgcatgattttttcgacatcgctgccgatgatgtcgaggttttcggctttgaagagctgagtctctttgatgccgaagaaattgtggcataaagcactcaaataatcatatccgaaattgaaatgcacgggtcctccagctgtcattgcataaatcaaacgatgggctttacataacccgactgggtagccttccggcgaatatttgaaggttagaccggtgacagttacatattccatgtatgttttcaggattgcggggaaagccagatcccaatatggagcagctataacaattgtatcggcggttgcaaactggcgggcatattttagctccggtgcatcaaggctgtttgattggacatggagaaagcgttgttggaggatatcccaattatctatggctgggattttttctgctgcaagattcagttcttctatttctccgtctagtctcttcaatagatgtctggcaagacgtagggttcgtgattcttctctgatacatgcattgataaacaaaatcttttccatgatttttgctccggttaaaatgaatcccgaaatactttcctatatttcgggattctgtatcgtataaaataaatcggctcttatatagctgttgtaaactgttccaggaaacggatgtcgttgtcaaagaacaagcggatgtctttgattccgtatttcagcatggtgatacgctcaatacccatgccgagagcgaatcctgtatatttgtttttgtcaataccattcagttccaatacattggggtcaaccatgccgcaaccgaggatttccaaccagccggtgcctttacatacattacagcctttcccgtggcaaagcgagcaggaaacgtccatttctgccgatggctctgtaaacgggaaataggacggacgtaaacggatttgagagtctgccccgaacagttccttggcaaaataggtcaaggtttgttttaagtctgcgaaagatacattttcgtcaatgtataaggcttcgacttggtggaaaatacaatgcgcacgtgctgaaatggcttcattgcggaatactcgtcccggagtcaccagacggatgggaggagtgtgggtttccatatcatgaacctgaacagatgaggtatgggtacgcaacaagatgtccggatgcttttcgatgaaaaaagtatcctgcatatcgcgtgccggatgttcctcagggaagttcaaggctgaaaaaacatgccagtcgtcttcaatttccggaccttctgagatggtgaatccgagacgggagaatatgttcagtatttcgtttttgactattgacaagggatggcgtgaacctaaattcacggtatcgcccggcatggttagatcaatgccggttttgccattgtctgacgagcacaattgttctttcagttcgtttactttattgagagccgctgtcttcagttcgttcagggctttgccgatttcttttttctgttcgttgggtacatttttaaagtcttcaaacaaagttgcaatactaccctttttgctcaggtgtttgattctgaactgttccacttcctcgggagtggtggcattaaagcctgcaatttctgttataagttggtttatctgatctaacattgtcaatgcgtttgattatcaaggttacaaaactaaggcatttaattgaaaattgaaaattgccggttgaaaattaggaaataaagcacaaaaattactttttccggcgtaaaatatgcaaaatcatgggataactcaggcaggcaacgacagctccggcgaaatcagccagcaaatcgtatatttctccgcttcggttgaaaaagtaatattgcagtatttctatcaatcctccgtacacaaccgtataaatgcaggctatcagatatgatttccagcgggcaaggtggctgtaataaaccaatgggaatatcaacaataaagatgcaacaaaaaataatccaccatgtactattttgtcaatatacgggatgttgaatcgaggattgggtatcgcatccccgggcaatgcgcaaagggtgaaaataatcactgtccataagatggtgataccgatgatggtggtgcgcggtggaatatgcatggctattcttctaaaatgcgtactttaatccggatatcctccagaggcctgtcgcttttgtctgtggggactgccgcgattttatcaatgatttcaaagccgtcaatcacttcgccgaatacggtgtattctttgtcgagatgatgtacaccgccttggttgatgtaggcttctcttttggcatcgtccatgtagattttgtctgtgttggcattccattcaaattcaatatcagcctttattttgttggctatcttacggaattctgccacttttttctgtttgcggagtgtatcaaggatggcttttttgtccggagtgtaatattttttctggattgcccttttaatgggaacgttgacctgcttttccatgatttccacttctttaggcgaatatttacggccttgtacaatatagaattgtgatatgtcggattctttgaaaaagtttacgcgatccggctgtcggggcgcggcaagggctccttttttatgataatggtgtggcttgatttctgcatcgattacaattggtttgccatagccgatttcgctgcctttaatggcatttcgactgtctgatgagcctccttggatgacaaaatccttgatgacccgataaaacaatgtgccgtcatagtgtttggctttggccagacggatgaaattatcccgatgttgaggcgtgtcgttgtataattttacagtcatgttgccgtagttcgtttcgatgactgcttttacttctttttcttgtgcgatagccgaatatgtacaaagaagtgcgaataatgccaggatgtatagtttcatagtacaatttattaccaatgacccaaagatattattccattttttaatctgcaaatcttaagattttaatcttgggcacaaagtttacggattagataacgtacagggaaataagaggcaatgtatccgataaaaagaacaactgcaacgatgattgccagatcgctgaatactaattttaccggataggcattgacaatatagctgccgtcacccaaagtaatcagtccgaatttttcttggataaggcaaatggttgtgcctgtaatcagtccgagaagggttccggtcagggtaatcagatttccttcggttttaaatatggtaatcaatttattttcggtcatgcccaatgctttataggtggcaagatcttctttcttgtcaagaatcagcatggagattgaaccgacaatgttgaaagaggcaatgagtaggataaatagcagtatcaggaatacggctaacttttctgatttcatcatagcgtagaaagcctgattaagctggtacttgtcttttatctgatatgtgtcaggcagtttttgtgccaaagtttctttgactgtctttgtttgggtcgggtcagacaggcgaatctctactttggataatcgtttgtcggtgtcgaacaattcttgggcaagtcgtaaatcggtgatgaggtattgggcatcgatatcttgttgtgaactgaaataggcacagggatagacttgcttggtatttagtgctgtgctacttgtttttttgtgtgcatcggggtagtaaagcagtatcggagtgtcggagtcgagcagggcttgcaggtgggctgcaactccatatcccataatggcttggaagccttgggatgtttgtagctggaatgttccttccaagaggttggctgtgatgccggaattctcagcatagtttttgtccacaccttttacgacaaccggtaacatgcgctcaccatagcgggccaatgctttttcttctattatattgttataagaggcaatgtctggttgggagttgatggtttgataaaaagaagaatcaaaataagcatatttcccggttgcgggtgaaataatcaaatcgggagtgaaactgtcggtgcttttctgtagcaatatatccatgccgttaaagacagaaagtacaacaatcagcgctgttgtgccgattgctacccctgtcacgctgatggcagagataatgttgatggcattttgtttcttcttggaaaaaagatagcgccgtgctatgaagaaaggcaaccgcatatttctattatttcaacaattcatcgattttgtcgatataatcaaggctgtcgtccacaaaaaaacgcagttccggaatgatgcgcatctgcttgccgattttcttgcctaagatgaagcgaatgcttttgttgtgttcctccaggctgtttaaaacactttctgagcgctcggaagggaaaatgctgacgtaaattttcgcatatgaaaggtccgggcttactcttacggtggtaattgacagcattgcacccactgcatactctctacactcttgttggaacatttcgcttaagtctctctgtattagacgagcaactttattttgtctgattgaatccatgtcgtgaaaaattattcgtaaaatttttctgcaaatgtagtatttttttctgaaacatttattacatttgcaaccgcaaacgagatgtagcgcagttggtagcgcgccacgttcgggacgtggaggccgctggttcaagtccagtcatctcgacaaaataaaaaaacgcatcatttttatggtgcgtttttttattttagctgtttatacagctaaagttaagctgaatttacttcctcgacctatttcgctttcaatggtcagtttgccgccatgagcttcgacaaagtctcgtgatatagataaaccgagtccgctgccttgtactttagtgccgggaacgcggaaataaggttcaaaaatactgttatgatatcgggcatcaatacctttaccaaaatctttgacatataattcaatgtgtttttcgtctttttgtttggctccgataatgacgcgactatgttctggggaatagcgtatggcattgctgagtaagtttgttaatacccaggcaattttttcactgtcaacaaaaagtttgctgattttatcttctggatattcaacttcaatttgaataccgaatttttcggcttgtacccggttggctttgagagcgtattcgatgagttctataggtttggtaattttgggctttatttgcagtttgccgctttctacttgagtcatgtttagtaattctcctgtaatattcaataggcgttcactgttttccttaatactttgcgagagttcttcttgttcggtatttaaagagcctactcgtttgtcttctaacaattggagactcataagtatggcagagataggagtttttaattcatgagaaatggtggaaataaaagttgttttggccgtgtccaattctttaaattctgtaatatttttaagcatgatgacatagcctttctgttttgaggtattgttgtggttgttagtttgggtgataggcatgtatttaatctgaaagtaactctctttgttgtctgcatatatttttagaggttcgtctttctttttattttctgttttttgcagggaaggaagttcacggatcagacgtcgtagcaagtcgttgcgtaatgcaatctcttgtgcgggtttcatccagatatcttcgcgttgtacgtttaatatgtttaatgcttcgtcattgatgaaaaggatggtcatattgttatctaatccgataatgggttcctttacactattgataatggtttccatatagtttttggcagccataatttgtgaaagggtgcttgaatgatagtcggataatctttgggccattcggttgaagtttttagacacttcttgaaattcatgctcttccaaatacagcctttgggtgtaattgtggtttgcaatttcttgaatgccttttatgatttcttggatgggtttattgatagaggaggggagtagagagagcataagtatacctatgctgatacagatacctcctacaatagaaatccataaaagagcccattgtagtccagactctgcagcaggactagtgggttcggtttctgtcaaaatttgcagattgacaatagaaagggaaacaagcagtacaatcatggcgactagaagacctatgcctaatgtcagtttcgtttttatattcatggcgtttttttttactggggaaatataatcaattttacattcatttcagaaagggcgcggagaaaacggcgataacgtggaaaaatgtaaaataaatatctgtattttaatctaggttgtccgatgcagactgacgtaatttgacgttctcgacaagtaccgacaatgctttttaagatattgttggaagagacttgtagtagttcaccacccaattctgtcactagtttgaagtgattaagcagatagcgttgtgcagagagattgattctgtctggattttctgcaggggtttgtacatataaggcaagaaattccgtgtcataacgggaggctaaccgggctgtgcggcgtattaggtggcgtggagtgttttcattgctgctgatacacactaaaaagcgttcccgaagtactgtcttatcgttcggtactatttccatatttacttttttctcaacgcggagggcaacttctttcagtgctaattcccttagttgaagaatattttctgttttaaagaaattatggagtgcggtttgtattttttctgttttgtaaattttaccgctttttagacggttgatgagttcttcggcagttaggtctatattgaccacttcatcggcttcttccaaaactttgtccggaatgcgttctttgacttcaataccggcaatacctttgatttcttcgtttagactttcgatgtgctggatgttgactgctgatacgacgttgatgccagcattaagtagttccatgacatcttgccagcgcttggaattgcgactgccatctacgttggtgtgagctaattcgtctacaataactaattctgggcgaatttgcaagatggtatctaaatccatttcttctaattctttccctttatagaaaattttttttcgggggataacaggtaacccatctaataaggcttcagtacctgttcgaccgtgggtttctacatatcctatttgcacgtcaatcccgttttccagcatctcatgtgcttcttggagcattcgataagttttacctacaccggctatcatgccgatgtagattttgaaaacgcctctttgagaacgtttgatgagttctaggaaatgttgtgcgcttgcttctcgcttattcattggtatgttattgttgtttattatttttccttggcttcttctaaagcaacatttagttttaatacattgatttttgcgggtccgaaaagtccacataggggcttttcgatgtttttttctacgatagcttttacttcatcttcttgcattctgcgagcttgggctacccgtttgatttgtacgtaagcacaggctggagtaatatggggatctaaaccggaagcactagcagttaccatttcagcaggtacttcatttctttttaaataagggtgatgtactaaaaaagtatctatgcgagcattgacttcggccagatattcttcattggcagggcctttgttgctaccagcagaactggatgcatcatatccgtcgccggcacaagagggacgtccccaaaagtaaatatctttggtaaactcctgacctatttgattggcaccaactattttaccatggagggtgatagtttctgcattaccatttttgcctggtgctgcaaattgggcaaaaatccaaagaacaagtatatagcatacggtcaatacaacacagaatgtaagtgtaagacggatggattttattaaatttttcatgattatatttgattttgaatgagtattaaaagaatagtccaatgaataaatcaattagtttgattccgatgaacggagcaattagaccgccaacaccatagattaataagttgcggcgcagcaaagcactggctcctatgggcttataggctacaccttttagtgccaatggaattagaatcggaatgatgagggcgttgaatatgatggctgaaagaattgcactttccggactatgtaaccccatgatgttcaatgcgctaagttgaggaacggaaaccataaacaacgccggtatgatggcgaaatatttagcaacgtcgttggctatggagaaggtggtcagtgtgccgcgtgtcatgagtaattgtttacctatttctacgatttcaatcagtttggtcgggtcgttatccaagtcaaccatattacctgcttctttggctgcttgtgtaccgctgttcatggcaacgcctacgttagcttgtgctagagctggagcatcgttggtgccatcacccatcatggcaactaatttaccggctgcttgttcttttttgatgtagttcatcttatcttccggtttggcttctgcaatgaaatcatctactccggctttttctgcgatatatttggctgttaaagggttgtcgcctgttaccataaccgtttttactcccattttacggaggcgcttgaatcgttcttcaatgctgggtttgatgatatcttgcagttcgatgataccggcaatttttttatttatacacacaacgagcggggttcctcctttgctactaatgcgttggatcgtttcttctgtttcttttggaaattcattgcctgcttcggtgactatgcttcgaatagcatcaaatgctcctttgcgtatttgagtgccgtcttgcaaatcaataccagaacatttggtttctgctgtgaatttgatcatgcgtgaaccggttgtatttaatgaacgtatccgtatgccttgttcatgtcccaattcgatgatagattttccttcgggggtggcgtctgatacagaagagagaagacaggcttcaataaaggtgtgttggtctaatcctttaaccggataaaaggcagtggcttttcgattaccaatggtgatagtgccggttttgtccaatagcaatgtatcgatgtctccagccgtttcaacggctttaccagatttggtaataacattggcacgtagagcccgatccatacctgcgataccaatagctgaaagtaatccaccgatggtggtcggtatcaagcatacgaacaaggagatgaaagctgcaatggtaatgatagtaccggaatagtcggccataggttttaaggtgatgcatacaacaagaaaaaccaatgtgaatacggcaagcaaaatggtcagtgctatttcgtttggggttttttgacggcttgccccttctactaaggaaatcattttgtccaaaaaactttcgcctggctggcttgttactacgactttaatatggtcggacaacacttttgtaccacctgttacggaacttttgtcacctccggcttcacgaatgacgggtgctgattctccggtgatggcactttcgtcgattgaggctaatccttcgatgatttcaccgtctgcaggaatgatatctccagcttcacagatgaatatatctccttttttcaattgtgaactgttgacggtttgtatggtatcgtggatgatgattttggctggtgtttcttcacgagttttgcgtaaactgtcggcttgagcttttcctctggcttcggcaatagcttcggcaaaattggcaaaaagtaaggttaccaatagaatgaagaaaactagtagattgtaagtaaaagaaccctgggatgtattggtggcagagtaaatagtgaccaataacataatcaatgtagaaacctctactgtaaacataatgggatttttaaccattactttaggattcaatttaatgaaagactgtttcaagctgtcggcaattaattctttttgaaacaggctgttattttgatttgttttcataaacagaaaatctttatgttctacaatttatttataatttatagactaaagtgttcggcaatagtgctgagtgcttgtgcagggaagaaggataaagcggcaataatgaagatgactgcaaaggtcataacggcaaaggtgacagtgtctgtctttagtgtgccggcactttccgggatgtattttttctgagctaacagaccagcaatggcaacttgtccgatgataggtatgaatctgcttaatatcaatacaattccacaagaaacattccaaaaccatgtattatcgcctaatccttcaaagccagaaccattgttagcagcacaagaggtgaattcgtaaaggatttcacttaagccatgaaatccaggattgtttagccagcctccttcttgtttgacaaattctggtgcatgtatatacagataagcggctaaagcggtgccaaccaaaataacaaatgggtgtagcagtgcaacgatggaggcaattttcatttctcgagcttcaactttgtgacacatgaattcgggggtgcgtcccaccattaatccactgataaatacagctatgatgataaaagtgaaatagttcatccagcctactccgacaccgccaaaccaagtgttaatttgcatgtttagcatttctatcatgccggatagtggcatggttgagtcgtgcattccgttgactgaaccattagaggtgacggtggtgacgatgctccataagccggtggctcctgctcccaagcggatttcttttccttccatagcaccattgtcttgtgttattcccatggcatcaattttaggattaccacccatttcctgagaaacattgattcccactccaattaaaaaagcaactagcatgacaccgaagatgctataacctaattttttgcgatttacataaaaaccgaaagcaaagaccattgccatgggaattagtatgatggagcaacattctatgatatttgtcagataagttgggttttccaagggatgtgaagcattgacaccaaaataaccaccgccatttgttcctaattgtttgatgggtacgattgctgctgcaggaccttgagaaattgtttgtgtgttgccttccaatgtagtaatttccatcttaccatcaaatcccatgggggtaccctgaagaatcaagatgaaaccgacaattaaagaaagaggtaataaaatacgggtacagcttagaacgagaaaattccaaaaattgccaattgtttgggttgttttttctcctaatgctttcatgattccagccatggctgccatgcctgttgcagctgtgataaattggaagagcatgatgacaaagagttgggtgaagtaggttaatccgctttctccgctataatgctgcaagttgcagtttaccatgaagctgatgcaagtgttgaatgcttgatgggcactttgatttaagttgttgtctggattaagaggaagataattctggcaagttaacagaatcatgccccatataaaccatacaaagttaaccattaatagggcttttaagaattgtttccaattcatttcttcgtcaggttgaattcctgataatcggaatatgaatcgttccaagggtttcataaagtcactccatactttttggcctttataaaccttggctatgtatttgccaagtgggtagctaagtgctactactaaaatgatttgtgctattacacctataatttcagtattcatgatttttttcttttttaaaatttctcgggtttaaccaagacatacattaaataaccaaatagaatcagacagataataaatagtgctgtatacataattatcttttttaaatgttttcaaaccaatcaatgcatttcatgaatatccaaaaacaggcaactcctaagagtatgcaaattacaaatccaatacttaacaattccattttttcttgttttatttgtgatacttatttatactaaactgtttattatattggcaatggatatgccataatgtgtggaatgaatgaaatgctttgaatgatagtcgaataggatttttattaatagggcaaaaaaagaaggaccttctcattttgagaaggtccttttatcattttgagataatagatttaaatatgataggtttctatttttcgatagagggtagctaaacctatttttaagagtcgtgctgcttctgttttgttgccatgggtatattgtaaaactttcatgatgtgcttacgttcgatgacagataattcaaattcgttactttcatttgtgtcttgaaagtggttgtgtcgcaattcgactggtaaatcttgcagagttactatattgtcacatacaatggcactgcgctccatgatatttctgagttctcgaatattacctttccattcggcttgttgcaaggctgtgagtacttcgggggttattccggagatgtttttatttaattttttggcaaattgctggagaaatgtttgagccaatatttcgatgtcttctttacgttcccgtaatggaggaagttggatttgaaaaactgacaaccggaaatagaggtcttctctaaaattgcctttttcaatctcacttttcaagtctcggttggtggctgcgatgatgcggacatttattttggtgcattttgtatctcctactttgatgaattcacttgattccagaacacgtaataatttagcttgtaggctaaattccatttctccaatttcgtccagaaaaatagttccgccatgagcttcttcgaatagtccttttttatcttttaaagcacctgtaaaggctccggctttgtgtccgaataattcgctttccaataattctttactgaaagcagaacagttaagtgcaatgaacggtttgtcttttcggggactggcctgatggatggattgggcaaatacttctttgccggtaccggtttcgcctgttagtaaaacgcaggcatctgtcgctgccactttttgagccatgtgtactacttcttgtaagcaagcagattttcctgtaatagcagaagagataagggtattgggttgtggtgttatctgttctgaatgatgtagtttctgttcagtcatggctctactgactaaggggatgatttttcggttgtcatcacctttaacaatatagtcaaaagcaccatttttaatggcttgtacaccatcaggaatatttccgtgtgctgtaagtaagatgatattagcttgtggggcaattttttttagttccggaaccatgatgactccatttccattaggtagaaaaacatcgcataaaatgacttgcacttcgtgctttttgagcatctctaatccgctggctctgtctttagcttgaaaaacttcatatccttcaagttcaagtattctgcttaacagcattctaatggtctgttcgtcatcaataatcagtattgtatccatggattatttgccttataaattctgtacaaatttattgataaattttggtgataaaaacatgttggaatatgaatattaaggtatggttattgatatatgaattttattatttacaatatcgccgttatgatagatgtccaggtgcgtattcacgaccgctttgttgtggaatttaagattggttatgtggtaaggaaggataaaccacgtagtgattttatgattaatacgtggatgtttgtgccgaatacgttggatataaattacgacacttactcaaagaatcagttttatcgtgatgtaaaatcgaatattcgtttgattactcctatatattctttgaaggaggttgcgaatgaagaggcattgccgtttcagtttttggaggtggctgttaatgagttgaatgttgaggctacggcggagaactttgcggaggcggaatatcaagtgaagatgttttgttccatcactaaaagtgctttgcgaagagaggttgaccgcgtatggcgttattctgatactgcaagtcgcttgaaagtgattgaagcgtatattttgcgggtggaaggtatattgaaaaaatatcgctgtttgtatgagttgttgccggttgatggtgcagggaaggatatacgggtttttcatagctttggtgatgagtttttgtctaatcaggtagatttttatacatttaagttgttggagaggcttcggaaaaaagataaagagtgttttgggttggtggaagagcgtttgttgaagcttgtccgtgatgaggtggtttatcgccgttcccgaggattcctggttgtggaaaggcatagcctcaatcgtaatcgggttgctttgtttcgtcgaagaatgctgcgtctgtatacagaaagtcatttgtttttaaaagccgaccgtaagaaggatggggcgatggtggaacaactttattttagtattgctgcgggtatttcaatgatttttgcaacgttgatatcgttttcttttcagcagaaatatggaaatttcacaacacctttatttattgctttggtggtgagttatatgttgaaagatagaatcaaagagctgacccgatattattttgtacatcgtcttgctaaaaagtattttgacaataagacaacaatcagtataaaggacaaaccgatagggtggataaaagaaggtgtcgatttcattacagaagaccgggtacctgaggaggtgatggctatgcgtgaccgttcagatattttagaggccaataatcgtcagatggcagaaaaaatcattctttatcgtacgcttgtccggatagacgggcaagtgttggatgagaatattcagtatgatgtttcgggcgttcacaatatactgcgttttaatgtatcgtcttttatactaaaaatggaaaatccggaggtgccgttggcggttcctaaagaggaaggaggctatgaaatcattaacggtgagcgtatttattatattaattatctgctgcaattgagaagcagtgaaaacgtcgattacaagcgttttcgtctgatcttgtcgcgcaatggtattgagggtatagaaaaaatgtaaacataaggcggtcatgtcttttaattgtcaattaattaccttagttttgcagaggtttataatcattatataatcgctatcaaaacgtagaaatgagaaaatggagtattgaggattcagcagaactgtataatatcaacggttgggggctgagttatttttctattaatgaaaaagggcatgtagcagtgacgcctaaagtaggaggtccttcaattgatttaaaggaattgatggaagagttgcaggtgcgtgatgtggctgctccggtacttttaagattcccggatattttggataaccggattgagaaaatatccaattgttttgaggctgctgctcaggaatatggctataaagctaagaatttcatcatttatccgataaaggtgaatcaaatgcgtcctgttgtggaggaaattgtcagtcatggcaataaattcaatattggattggaggctggttcgaaaccggaattgcatgccgttttgtcaattgacattgatgaggatgcaatgatcatttgtaatggttataaggatgaaagttatatagaattggctctattggcccagaagatgggtaaacgtatctacttggtcgtagagaaattgatggaattgaagaccattgcccggcttgccaagaaaatgggagttcgccctaatattggtattcgcatcaaattggctagctccggtagcggaaaatgggaagaatccggtggagatgtcagtaaattcggtgtaaattccagtgagctgttggatgctttggaattgttggagaagaataagatggctgattgtctgcagttgattcatttccacataggcagtcaggtgacaaatattcgtcgtattaaaacggcattgaaagaggcttctcagttttacgtgcagctgaagcggatgggctataatattaattttgtcgatattggtggaggcttgggggtagattacgacgggacacgttctgctacatctaatagtatgaactattctatccaagagtatgtgaacgatgctgtttctgccattgttgatgtgtgtgagaaaaatgaacttccgcaaccgaatatcattacagagtcgggacgttcgttgacagctcatcattcggtattagtatttgaggctttggcaagtacaagtcttccggctttcgatgaagcggaggaaatagatgaaaatgcccatgaactggtgaaggaattatatgaattgtgggataatctgaatcagccgcgtttgttggaaacttggcacgatgctttgcagtgtcgtgaagatgccttgaatctttttaatttgggattgattgatttgaataccagagcacaggttgaacgcttgttctggtcggtagctcgtgaagtatatgagatggcagatgcgacaaaacatgcaccggatgaattgaagaaaattgcgaaaatgttgccggacaagtatttttgcaacttctctttgtttcaatcgttgcctgactcttgggctatagatcagattttcccgattataccattgtcacgcttgaatgaacagccaacaaaatcggcaacgattcaagatattacttgtgattcggatggtaagattaataattttatctctacgcgtaatttctcctatcatttgccggtgcatgagttgaataataaagagccttattatttcggagtgttccttgtcggagcttatcaggaaattttaggagacttgcataatttgttcggtgataccaatgctgtacatatcaaagtgaagaatggcgaatatgtcatagataaggtgattgaaggagaaacagtggctgatgtattggagtatgtacagtttactccgaaacgtatggctcgtaccgtagaagtctgggtgatgtcttcagtgaagaagggtatcatttctccggaggaagggcgagagttcttgtcaaattatcgttcaggattgtatggatatacttatttagagtaagtagaacgaagctattataatgaaaatatgcctgacatgaggagcattcctgtatgtcaggcatattttatttaaaagtggcttaaaaacatttggaatagacgcggtttcaatagtatgggaaatacgaatccgaatacggctccataaaaatgggcattgtgattgatgttgtcgccaccttgacgggccatatattggcagtaggctaagtataaaacaccgaacagtattcctggaatgggaataatggcgaataacagaatcttatcccaagggtttaaaaagatggcggcaaaaagtacagcagatacagctccggaagccccgatggaggtgtaccattcagcgttccggtagcgtatgatgtcggaaatggaagctgctatcataccgccaaaataaagcgttagaaaagcccatttgccaaagcctaaatattcgaatgcggtttcgatgtagccgccgaatgaccaaaatgtaaacatgttcaccaataaatgaatccagtcggcatgtacaaatccatgggtgattatgcgccaccattcttgatgttggactacgcgataaggttttagggataggtgttcaaatagctggtatttattgaagcatactattgaaacggcggctgtgactataataagtaaatcggtgaacatattttgttatttaaatctacaacttaagaattggtatatgagttttgctgccagaaaatccggagccttgttacttgcatttggacaaagttcaactacatccaagccgataatgttatggcgttcgttgatgagcttcaataaggtcattacatcgcgatagctcaatccatccggttcgggagttcctgttgaaggcatataggccggatccaatacatccaggtcgatggtgacgtaaacattgtctagtagtttttgtgatatttcgtacatccaagttgtatcacctaattctttgatctcgtgtgcatagaaaatgcgttccgggtcaatattatgtttttcttcaatggctgaacttcggattccaacctgtacgatgctggaggtgatgtctttgcctcttgccatgacacatgcatggttgtatggagatccttcatattcgtcacgcatatcggaatgggcatccaattgaagaatggagaagttgtcgtagtgttttgcgacggcacggaaagctcctacgctgacagaatgctcgcctccaagaagaaccgggaattttttgtcatccaaaatagtattcatgcgacgttctacttcatctgccatggcttccggtgatgaattttcagtcacggcatctaaagtggcaataccttttttgaatacttccgagtctgtctcaatatcataaaattccaagttgaaagaggcttccagtaaagcttgaggacctttatctgcgcctttaatccaagtgctggtgccatcatatggtaccggtaaaatagcgatttctgctgtttcgtaatttgtgtacttttcttcgaaatctccgtaaagtgttttctctgccatgattatttacaattatttgttttcaactgttttacttcttctattgcggcatctttgtcaattgttttgagctgtctgccttgcatcagccattcgccatgtaccatggttgaatatatatttttgctattcatggcatatactatggcggaatattcgtcgtatatcggttgcatattggatgcgtctgcatgcacgagaatcaagtctgcacttttgttgatttccaaagagccggtaatatttcctaaaccgagagcttgagctcctcctattgtggccatgcgaagagctgttttcgcattgacggcttccgggttgtagtcgacgactttggctaataaagcggcaaagcgcatttcttcaaccatatcgagggagttgttgctggctgttccatctgttccgatacctacagtgattcctgctttcaggcaggaatcgataggtgctattccactggatagttttaagttgctttttgggcaatgggctatggatgtttttgtttttgccagcagttccatctcctttggattgagccatacacagtgggcggcaatgacgtttgtgtctagtaatcctaaagaatataggtattctgccggtcgcatatttgtgcgggcttgaatgtcttctacttctttacttgtttcagaaagatgtatctgcaaaattgtattgtgcttgtcggccagatatttggctttctttaatgtttcggcagagcaggtgtaaggagcatgagcacagatggagggatgtattaaatggtctccttcccaattgtatataagttcctcggatagcgtgatgcctgctgttaggtcgccaaagctcggtgttgggaaatcaattagcgattctccgacaactccgcgcatgccggccttatgggcttcttctgcaatggcattttcaaagaagtacatatcattaaagcaggttgttcctgatttaatcatttcaactaatgccaagcgtgtagcaatacgtacattttgttcgttgacaagccgggcttcagcagggaaaatgtgttcggtcagccaggtatgcaacggtaaatcatcggcataaccacgcagcatggtcatgggtagatggttgtgtgtgttaacaaatccgggcagtatgtacatgccttgtgcatttgtaatttcagcatccggatcggatagagttccggatgttatttctttaatgtgtcctccttctattagtatgctgccgttggggataatttccattccggcattcatcgtaataatgtgggcgttgctgattatttttttgctcattattttactttttacaaaggtagctaaaacttctcaatcttgcattttttacgaaataaagcattggtattttcttttgaatttaagaaatttgtaccagtttttatttttataatagcagatgtcatttattgtattatgttgttaggtgcgatattacccattgtctgttttgtattattgcttggagtatgtaaattatctggagttttaagcagtatattgtcgttgtgcttgacgcttatcattgctactgttgggtttgatttttcttttcaagatatatgtggtagtgtggtttatggagggatgaaggctatgtttccgatactatttattattgtgatggccatgttcagttataatttgctacaaagtaatggacagatggaaataataaaaaaatggtttgcaaatcttgtttcagaacggagtattctggttttattgattacgtggggaggaggaggacttcttgaggcaatggctggttttggcacggcagaggcaatatgtgtgtcattgcttgtcagtctgggtttctgccctttattctctgctattgtttgtttgttaggtaatagtatgataacagcttttggagctgtcggaactccagttttggtattagctgaagaaacaggaattgatgcaggactattgggaaaggatattataatgcaacttggtgtttttgcttttttatttccttttgttttattggtgatggcaaaaccggagcgtagagccttgcctgaacattttttattggccctattggtcggtagtgcttcgttgttggggcaatttatggcagtgctttatattggtgtcgaggcgccttctattgttagtagcttgtgttcgattgcagtaatattattatataatcgttttcggatattctataagagagacagaaacaacagaaattacaatgttataaccaaggggcaattgtttcgtgcttggagtgtatatatattcgttttgtttcttatagttattactagtcctttattttctgatttccgaaaattgcttgcagcatatgcaactagtcattttaattattccataggtgggcataatgtgtcttattcaattccgtggttgattcagggaggtttgttgattggcatgggaacatttttgggtggattgttgcagagtgtttctgttaaaaaaatgtttgggattttaggaaagactatttatcaattacgtaaagtttttgttactttggtatgccttattatcttgtctacagtgatgaattatgcagggatgataacttgcattgcaatggcagcagcaggagcattgggagaggtgtatccttttttttctcctttgataggatgtttgggtacatttattacagggagtgggacttcatctaatattctttttggaaaacttcaggcagatatagcagtccaattacacattgagccgaattggctggctgcaggtaatatgtcgggtacaactgcaggtaaaatgttttcaccgcaaagtattgctgtggtaacatccaatccgattctgaaaggacaagaaggggtaattttgtataaaatgttgccttatgcattggtttatgtctgtatgataggtgctattgtgttttgttttagttgattatcaattaaatttataattaagctcaaggcgtaaattggttatttcgtgaaaaatattggagtggaaagaaaaaaataaaaccgacttttttagtcggttttatttttttagtctaatttcaaaactgctaaaaaggctttttgtggtacttcaacatttccgatttgtttcatacgtttcttaccggctttttgtttttccagcagttttcttttacgcgagatatcacctccatagcatttggctgttacatcctttcggactgctttgattgtttctcgagcaataactttagctccgatagcagcttgtactgcaatatcaaattgctgtcgtggtatcaaatctttcagtttttcgcaaatgcgacgtccgaaagcataagcattatcgaagtgaatcaatgctgagagggcgtcaacagattctccatttaatagaatgtccaattttaccagattggccttgcgatagccgatttggtaataatcgaaagaggcatatcctttggtaatactcttcaatttatcatagaaatcaaatacaatctctcctaatggcatctcgtaggtgatttctatacggtttcctgtatggtattgttggttcaataggatacctcgtttgcccaagcagagagtcatgattggaccgatataatcggctggggtaataatttgtgcccggataaatggttcttcaatataatcaagtgtgcttgcagatggcatatccgaagggttgtgcatttcatatacatcgcctttggttgtgtgtgcaatatacattacgttgggtacagttgtgattacgttcatattgaactctctgtccaaacgttcttgtacgatttccatgtgcaacatgcctaagaagccgcaacggaatccaaaccccaaagctgcggatgattccggttcaaaagtgagggatgcatcattgagttgcaacttttctatagaggctcgcaaatcttcataatcttcagattcgataggataaatacctgcaaataccataggtttaacctcttcaaatccgtcaatggctacatcacatggtctgtttacatgagtgatggtatctccgacctttacttctgaagaggttttgatacctgagatgatatatccgacatctccggtctttagttctgctcgaggttccggtttaagacggagcacaccgatttcgtcagctgtatattctttaccggtattgacaaattttactaaatcgcctgttttcagactgccattgataatacggcaataggtgatgattcctcgaaatgaattaaattccgagtcgaaaatcaatgcttgtaatggttgtgaaggagaacctactgggtggggtacacgttctacaatggcgtggagaatctcttctactcctaaaccggttttgccactggcttcaatgatatcatctcgcttgcagccgataagttcgataacttggtctttcacctcttccggcatggcattcggcatgtccattttgtttaatacaggaatgatttccaagttgttttctactgcaagatacagattagatatggtttgagcctgtattccttgcgtggcatcgacaattaataaagcgccttcgcaagctgcaatggagcgggatacttcatacgaaaagtcaacgtgtcccggggtatctatcaggttgagaatgtattttgttcccttgtatatatagtccatttgtatggcgtggcttttaattgtgatgccgcgttcgcgttccaaatccatgtcgtcaagcacctgggcttgcaggtctttgccggtaacagtgccggtatattccaatagacggtcggccagggtgcttttaccatggtcgatatgagctataatacagaagttacggatattttccatgtgcaatataataggattaaatcaggccgtaaagatagtaaaatttagtttgtaaagtattgtatgttttgagtatctttacagcgtttttagacaaagactctttaaatcaaatgctatggtaaaatcaatgaccggattcggcaagactactgttgaattcagaaataagaaaatcattattgagattaaaagtttaaattccaaacagttggatttgaatttgcgtattccaaatctttataaggaaaaagaaatggaaatcagagggttggtaaaagaacgtctggatagaggcaaagtggatatggtgatttactttgataatgccgagtctgaaaaagatgttgtaatcaatcgttcggtagtgactcaatattttaaccagatgttggaaatatcagaacagttgggggtggatacagataagggtgctttgttacagactgtgatgcgtttccctgatacgttacaagtgaaagcagaagaattagatgaagaagaatggactgttttacatgtaggtgtagagaatgccttggaagagatgaatcgtttccgtcttcaagaaggggctgcattgataaaagatattactcatcgcatcgctttgattcaggagttatctgctcaagtacctgcttttgaaaaacgtcgagtagaggtgattcgtcagaaattgcaggaaaagatcaatgagtggacagatgtaaaaaatatagatcaaaaccgtttggagcaggagataatatattatttagaaaaactggatatcacagaagaaaaggtacgattggccaatcattgcaagtattttttggaaactgttgagaaagaagaggcaccaggacggaaaatcggttttattgcacaggaaataggtcgtgaaatcaatacaatggggtcgaaagcgaacgatcatgatattcagaaattggtggtgaagatgaaggatgagttggaaaaaatcaaagagcaaagtcttaatgtattgtagttttatgaaagggaaagtgattatattttcagcgccgagtggttctggtaaaagtaccattattaaccatcttttgaaaaagaatttgggattggaattttccatttcagcaacttgtcgtttacctcggggtgaggaacaacatggacgcgaatattatttttttacacaggaagagtttaagaaacatattgatgctggtgattttttagaatatgaagaggtttatccaggttgtttttatggaactctattaagtgaagttgaaagaatatgggcaaaagggaatgctgtgctttttgatgtagacgttgttggtggtgtaaatattaaaagaaaattcggagaacaggcattgtcagtttttgtgcagccgccttctgtggaggaattagaaaagcgtctgataggacgtggtacagatgctcctgagaaaattcgtgagcggatagcaaaagctgaatatgaaatggcatttgcagaaaagtttgatacaattgttgtaaatgacgatttgaatcaggcattagaagaagctgagcataaagtgagggcatttttgtcattataaaagcgatatatagcatgaatcctctggtcggactttttttcggttcctttaatcctttgcacaacggccattttaaaatagccgaatatttgttggatgccggatattgcactgaggtgtggtttgtggtgtctcctcaaaatccgtggaaggttgatagttcgctattggacgaaaagaagcgtctggaactggtgaccgcggctattggcaatgacatacgcatgaaagccgtggatgtagaattttctatgccgcggccttcttatacttatcagacattgaaagttttgcaagggaatttcccgaatacgagttttgcattaatcataggtggtgacaacttgctgcgttttcgagaatggcgtaatgctgaagatattttattgcaattccctattttggtttatccgcgtcctggagtaattttagcagaatgtccggtaggcaatgttacgttggttgacgctcccttggcagatatttcatccacagaaattcgccgtaaagtgaagatgggcgaagatatatcaatggatgttccggctaatattgttagtttggtgaaacgttactactgatttctccctatatgtgatgagtattttgagggtaattacctaaaagaggtgattgtacaggttgtatttagcccctatctttgtaatgtcagaaatgagaacgttttattgattaatatttatagttgcaatgtcacaggttttagccgacctgtgactttttttatctcttctttaataaggacaaaaaaagaaaacaccggcaggatgcgacttgcggatccttcaaatgaaaggaatgtatcataggaatcatggccacataattatgtccttgtatacattaattccacctccggtgtttttcacagtacagtaaacatatatgcgcagtcgtctccctctaaatccacgagagtgcagacatttgcttgtacggcaggtcttctgacttacttcgtttcgggcgccttcccgtcttgttaaatgaagacagtggcaggagtattgccctgaaactctattgaagttcacagcagcggggtctgttcaggatttgcacctgattcccttttatttcccttgccgaatgacaataggaaaaccagtacatgggcaaaagtaatcaattaattgaaaattggaaatatccagaagaaaataaaatgcaataaaagttctgctacctataaatgattaaggggtatgtttctttcatcattattggggattgtcgagcccatgccttccatctacttttgcaatgcttgaaaatgatattttatagattaataatatgaaaaagacaaatttatttttagtggcttggatgatgctgggagtggcatttacagcttgttcggatgatgatgaggatggtggtaaatatgatggtgcttatactgaaaaaacggtagaggctcatgaatatggcgcatggtcttattttaattttgagacaggtgaggtaaagaaattggcaattaagaaagaggaaggtgctgtaaccggattgtataaagggcctttgaaagggactgggatgtttgcaacgatagtttcaattgatgagcaaccaatgattatcaatcgtatttctgccgacagtgtggagattattttgtctgatttggtgatgtctatgccggggacttctggaaaaccgactccttttactgtgaaaactcattctaaggcaatcaaagagggaaatgtatggaagttgacaggaacagcaacagataatatagttgaagatggtaagggtggttctattatctacaagttgactgttgatggtacgattggtacagctaaaggggaagcgcttgctttggagtgtaaattgcgtcccggtgctatgccaatggatattactgcaaattattcggcaactgtagccaataattatgtatatggtgttgatgcagctgaagagtcggcattggattgggatattgcaatacataaatatgatatccggacaaatagcggcttggtcaaaaaaatgacaacaacagatttggatgcggtaaatactacaaatcttcctgcagaaagtgaaatggttgcagatacggatggttctgtaatggctgatatgactaatatgcaattgggatatgtcggttttcaggatgtgaagttgaataaggaattaggcggttgggtgactgcaactcctacaggaacaatgcctccgtatacgtacacattgaatgataatgtatttgttgtgaaagtggatggtaaggtgtggaagatgaaattcacagcctatacttatggaggaaaaacagctgccaagttttattatggagaagtgaaataaatagttacaacccattcttataatatttatgcagaagatactatggtttgtgttcgtcctgttggctttgcctgtatgggcggaagaagaaacggctcctgttgttgtttgtacaattaggggagtagtattggatgaagcaggagcgcccttaccgggtgcttctgtttgggtaaaaggtacaaccatcggagctggaactaatgcacaaggcgagtttgccatagctctccgtaaattcggcagtcaagttttgcgtattagctttgtcggttataagacacaggaatatacgtggaatggtgatgaaagtgcagtggtgacaattcggctgcaagaggctcgtaattccatggatgaggttgtaataacgggtactcgtacaccgaaacccttaaaagagtctccggtattgactcgcgtgatttcccagcgggaaatagagcagataaatccgatcgattttcagaacttattggaatttgctttgcctggtttgcaatttggtgttgcgcatggttctaatttgccggagttgaagtttcagggagctgccggcggatatgtattgtttttaattgacggagagcgcatcggaggggaaggagcaaatggtaatatagattttgaccgtattgatattgataatattgcccgtatagaggtcgtcaaaggagcgatgtctactctttatggagcacaggcgatgggaggggtggtcaatatcattacaaaaaatgcagatcgcccgttaacagcggacgtaacagcccgttggggtaataaaaatgaaatgaagtacgctgcttcagtcggtacaaaattgagtcgtttttcctctttaacatcagtatcttatcgtaaacgagatccttatacagtacaagatgaggagggacaaattacagaaacaaataaggacggagtaattattcgtgacaccgctgataaaaaaacatctcaagtgttgggttatgatgcctggtctgtctgcgagtgtttagggtattcatttacagataatttgaaagctgaattagctggtagttattatcgtaataatttgcaggacccttatgaaagtgagggcgttcaaaatcggaacgaaacattttcattaaatccgaaactgacctatatcttgaatgctaatcatgctttgacgttgagttatatgcttgatgattatagtaagcatgaaatatatgctgatgatgctcctgacaggaagacgatggaggattttaccaacaatgtacgattgaactattctggtaaactgaatgaaaaacatattttgactgcaggattggaagtttatacacaacggatgaagcactattggtttgataaagaggcaaatttggagtataagtttcagaattatgtattgtatttacaagaagaatggaaaatagccaaacagttcagtttggttgccggtgttcgtacagactgtcattctgattatggctttcatgccagtccgaaaatctttatgctttatcgtttaggtgattttgctttacgaggtgggtatggtatgggttttcgtttgccgactttaaaagagttgtatgcctcctatcaaatgggaggttttggttttatgatttatggaaatccggatttaaaacctgaaaaaagtcatcaggggacattgtctcttgaatataccaaaggggtatttaatggttctgtatcaggttattgtacaaaatatgaaaacgagatctatttaggatattatgaagcggatgacggaaccaatgctcagaaatattttaatcatgaaagtagtaggaaatatggtattgacgttatggggcaggtacgtttggattgtggatttacattcaacggttcctattcttatgtaaatcctgatgacaaaacggatggtggatataatacctctgtatttcggcctcacagcttgacatttacaacaaattatgcccggcagtatggaaaggtgaagacctctgtagccttgaatgggcgttggtcttccaaggtggatgtttggagtaaagatgaggagggtgtatatactcgcactccttattatgccaatacttccattgatttgaatttgtctgctcgttttccgagaggggtgcgtttcatgctgggattggacaatttattgaatttgaaagctaaaaatggggctacggattcatctgttattccacaacgtggaatagaagtggtgggtacgttgggtataaatatagcagacctatttaaaatgtaagtaataataaatcaatatttatgatgaaaaagaaaataataattgcaggtattgtggttttggctgtggtgttgggtatatggggctataatacttggtttggaacgacgaaagtggcattcgtaaatttccagacaattaatatgggagcaatatccaaggccaatgataatccgaaagtaaaagtatatgatgtggcgacagattgtctcggtgagttggtaaattatgatatggtttttgtcaacggtatgggcttgagaatagtagaggatgaacgggcattgatacagaaagctgcagacaaaggaatacctgtttatacgaccatggcgacaaatcccgctaataatatttgttctttgggagaggagcatattgaaaaggttgcggcttatttgagtggaggacgtaaaaactaccggaatctattgaattatattcgcaaggaaattgacaaaaaagtaggttctgttatacaaccggaagaaccggtggaacgtccatgggacatcctttatcatgccggattggataatccggatgaggaggttgaatttacatcggtgactgcttatgaagcttttttgcgggagcatggtttatataaagacaatgcccgtaagattgtcgttaccggtcagatggcagatgctacgggactgattgcggctttggaaaaatccggacataacgtgtatcccatttcctctatgagtaatttgctgtcgtttatgaaagaaataggaccggatgctgtaatcaatatggcacatggtcgtttaggagatgctgttgttaattttttgaaagaacgtaatattgttttattttctccgcttacaatcaattctttagtcgaagaatgggaggctgatccgatggggatgtctggcggtttcctttcacaaagtgtcgtaactcctgaaattgacggtgcgattcgtacatatgcgctctttgcacaatatgctgatgaggagggaatgcgtcattcttttgcagtgccagagcgtttggaagtttttgtgcagaatgtgaataattatctgatgttgaaaactaaaccgaacagtgaaaagcggatagcagtctattattacaaaggtcccggacagaatgctatgactgctgcaggaatggaagtggctccttctctttataatttgttgctgcgcttgaaatctgaaggatataaagtggagggattgccttcgtctgtagaggcattcgaacagatgattatgtctcaaggtgctgtattcggatcctatgcagagggggcttttgatgcttttatgaaaaatggtaatccggaactgataacaaaagaacaatacgaatcatgggtaaaacaggccttgcgtccggaaaaatatgcagaagtggtagcagcgaatggtgaatttccaggtagttatatgtcaacatctgatggtaaactgggtgttgctcgtttgcaatttggcaatgttgtgcttttgccgcaaaatgccgcaggttctggtgataattcatttcaagtggtgcacgggaccaatgcagctccccctcatacttacatcgtttcttatctttggaggcaatatggatttaaagcagatgcattgattcatttcggtactcatggcagtttggagtttactcctaaaaaacaggtggctttgtgtagcaatgattggccagatcgtttggtgggtgctgtgcctcatttttatatctattctattggtaatgtaggggaaggtatgattgctaaacgtcgttcgtatgccggattgcaaagttatttgactcctccttttatggaaagcagtgtccgtggaatctatcgggacttgatggagaaagtgaagatatataatgctaagttgggggcagagaaaccggtaactcaggctgagctggacaaagcctctttggctgtaaaagcttcgacagttaagatgggtatccatcgggagttgggattggatagtgtattgacgcgtccttattctgaagatgaagttttgcgtattgagaattttgcagaagaattggctactgaaaaaattacaggtcaattatatacgatgggagttccctacgaaaaagaacgtattgtatcttctgtttattcaatggcaaccgaaccgattgcctatagtctgtttgcattggataaaatgcgtggtcaggttgatgcaaaggttgttgaacacaaatcagtgtttactcaacgctatatcgagcctgctcgtaagttggtcggacgtcgtttgtccaatccgcgggaggttagtgatgaggagatatgtcgtttggctggaatttctatgaaagatttggctaaagctcgtgaaattgaaaaagagcgtaatgcgcctaaaggtatgatggccatgatgatggctgcgcaaaaaaaatctgctcctgacatgtcccaaatgatgtctcggatgggtaaacagaaaaaagagtatacaaaagaagagataaatatggccttggcagtgatggagatagaacggacagtgaaaaatataggtctatacaaacgacagttggagcaaagtcctgaaaatgagttggccagcatgatgaatgccttgagcggcggatatacagctccttctcccggtggagatccgatagccaatccaaatacattaccaaccgggcgtaatatgttttctatcaatgcagaggaaacacctacggaatcagcatgggaaaaaggtgttcaattggcgaaaagtacaattgatatgtaccggaaaaggcatgacggagcttatccgaaaaaagtaagttacacgctttggtcaggagaatttattgaaacaggtggagcaacgattgctcaggtgctttatatgttgggagtagagccgattcgtgatgcttttgggcgtgttagtgatttgtgtttgattccttctgctgaattgggccgtccgcgtatagatgttgttgtacagacttcaggacaattgcgcgatcttgcagcctctcgtctgtttttggtaaatcgtgctgtagaaatggctgcagcatctaaggatgaccaatttgataatatggtgacagcaggtgttgttgaagcagagcgtgcattgatggaaaagggaatcactcccaaagatgctcgtgaaatggcaactttccgtgtatttggtggtgccaatggtatgtatggaacaggtattacggggatggtagaggctggcgaccgttgggaaagtgaagaggaaattgccgatacttacttgaataatatgggtgcttattacggcaatgaaaaaaattgggaaacattccgacagtatgcttttgaagcagcattgactcgtacggatgttgttgtacaacctcgtcagagtaacacctggggtgcattgagcctggaccatgtgtacgaatttatgggaggaatgaacctagcagtccgcaatgtcacgggtaaagatccggatgcttacctgagcgactatcgcaaccgaaacaataaccgtatgcaggaattgaaagaggctataggggtagaatcgcgaaccactatttttaatcccgcttatatcaaggaaaaaatgaaaggtgaagcttcttcagccaatacattttctgaaattgtccgtaatacttatggttggaatgtaatgaagcctaaggctgtagataaagagttgtggaatgagatttataatgtgtatgtgaaagacaaattcaatttagggctgaaggaattttttgaaaatcaaaatcctgcggctcttgaagagatgactgccgttatgcttgaaacggtgcgtaagggcatgtggaaagcaagtgagcagcaggtggcagatttaacccaattgcatacagaactggtgaataagtataagccatcttgttcgggttttgtttgtgataatgcaaaattgcgtgatttcatagcatcgaaagtggatgcacagactgctgctgagtatcaaaagaatatttcgcaaattcgtgaatcagtggctcaaaatgacaataaaggtatggtgatgaaaaaagaggagttgaatcaggtggctgaacagcagactcagcaggtggatagtctgtggattgcaattgctgtggtactggtgttggtcggtttggcggtcttgatgcggagaagacgtaaaaacaatgcttaactatggatacaattgtttggattctgatatttattactgctttcaattttttattgaagcagactttctggagatggaaggcaacttcggttgcctccatccttttggcattgtttattgtattgacttggggatacgctattgaacagtcgaaaacacagattgccgattggttggccaatcaggcattgatgttggatacatcggttgtgttgacggtagaggtgtctttgcaaatggcattttgtctgttatctgtacatgtgacaaatatgtttccggtaagaaaaagaatgcggtttgcgtatcgtctgctttattggtttccgggagtattggtcttccccgtattgtttttcggactgacccagttgatttttacattgccgggagttgcttttcaaacagtagcttggggctttgcaattgccgtattgctgttgattccgttagggcgttggggattgcgtcggcttttgccggaaacagatttgcgtttggaattgctatttcttaccaatgctcttgttgccattttaggtattgtggcaacagtaaacggccagactgccgtgaaaggagtggcaacagttgattggttggcgcttgccggatgtatcgggatatttattgtcggaggtatactggggctgctccggcaacagttgcggaagagataaaaagaatgtttacatgtaatttttgattcaataattaattaaataataagaagatgaatacaatttctgacatcatgttttggatatcaacaggtctgcttgttcctgttatcgtgttattgatagcgttgtttttccgttcgcttttattggtgggaagctttttcggacagtatcttgccattcgcaaaaccgacaagatgctacgagaacagttagaggctttgcgtcttgcaaatctggacgaatttgacgggaaattgcctgctaacaataaatccttggttgtgacttatatgcgacgtatcatggaagcacgggagagtcacgctcaagtgcaacgtcttttggcaaattttgagatagcagccgataaagatttggcgacctctaaaacacttaccaaattgggcccgattctggggttgatgggaactctgatacctatggggccggctttggtgggattgtcgacaggagatatcgctcccatggcctataatatgcaggtcgcttttgccacaacggttattggcttgtttgccggggcaataggttttttgactcagcaagtgaagcagcgttggtatcttcaggatatgacaaacttggaatttttagctgaattgataaacgaaaaacgtaaccgggcatgaaacgtaatttattgaaaaaagaggaagacagcgatccaatcagtgtggtttcaaatctgtttgatgtggcaatggtctttgctgtcgcattgatggtggcgctggttacaagatataatatgacagagatgctttccaaagaggattttacaatggtaaagaatcccgggaaagaaaatatggaaatcattactaaagagggagaaaagatcaatcgatatacaccctctgaaaatcagcagcaatccggtacacgcggaaagaaagtggggattgcctacgagctggaaaacggagaaataatctatgtcccggaataacttccagactaaaagtgttacatttggctgttgaattccatgaacagccaaatcacatgatagcttgtaaaaaaaacgaacggaaaacagaggaaactgcctctttcctttttgaacgggaacggataaagttgcaacgcagtttttcggcaatgataaaagtggtcggtcctgtatgtaatctggattgcgattattgttattatctggaaaaagatgctctttattcaggtacaccctttacggtggcagccttcggaatgcgggaggagatgctagagaaggtaatccgtgattatatattgtcacagccacaggaacacattgagtttatctggcatggcggggaaccgactttgttgggattggactatttccggaaaatactttctttgcagaaaaagtatggggacggaaaggtgatatccaactccttgcagacgaatggcacgcttatcaatgatgaatgggcagcattcttggcagccaaccattttttgtgcggactttcgattgacggtccggagcatttgcataaccgtcatcgttgtcatcccaatggtaaaggatcttgggctgaggtggtagcctgtgcccgtctttttcggaaacatggagtggaattcaataccatgtcggtggtaaatgcttcgaatagtaaagaaccggttgccgtgtatgatttcttgaaagagttgggtagccgttttatgcagtttacgccgattgtagaacgcatatcgttggatgaaaatgccgtattgtctattgttgacaatcgctatgcaaaagagacggctttgatgcaggaaaatgtcagtgcagaggcatggggaaatttcctttgtcgtatttttgaccgttggataaagtcggatgtcggttattgctatatcaattggtttgacaataccttggccgcttacatgggcgagcagccggcactttgttcgatgaggacttattgtccttgttctttggctatcgagcacaatggggatgtttatagttgtgatcattttgtatttcccgattatcggttaggtaatttgactgacgagagtttgacagaaatggtcaagagtgatcgccagctatattttgagcagtataaacaagattccttatcctctcgttgtaggggatgtgattacctttttgcttgtggaggagattgtcctaaaaatagaatacagatcactcccgaaggagattcagtatctacgctttgtggcggttttaaaatgttttttgaacatacccgtcgctattttgaatatatggccaatgagttaaaaaataatcgccctccagcgaatgtgatgaaggtaaaattaggataaaatgataattgaatgatgagacaaactatattgttttcaagtattgctgtcgtaatgggtagcgttcaagctgaggcgacaaaaccagccaaggtaaagaaaaagcctaatgttgtttttatcatagccgatgatttgggttacggagatttgagttgctatggtcaggaaaaattccggacgcccaatattgaccgtttggcgagagaaggtctgcgttttacgcaatgctattccggcaccactgtcagtgcgccgtcgagagcctgtttgatgacagggttacattccggacatgcgccgattcgaggcaacaaagaggtattgcctgaagggcagatgtccctgcctgccgggacaactacgcttttcagcattttcaaagcggcaggatattccaccggttgttttggtaaatggggattgggagctccgggtacagaaggtgaccctaaccgtcagggggtagatgatttttatggatacaattgccagttgctggcgcacaactactacgccgaccatctctgggacaatgggcaacgagtggaattgccggagaatgcggatggagcttatggtagctacactcaggatttgattcacgaacagagcttgcagtttttggatgaaaaccgggtccgtccttttttcctttttttgccttatgtattgccgcatgctgaactaattgttcccgaagacagtatcatccaaaaattccgggggaaatatccggaagagccttttcagggatgtgattcaggtccctatttccgcaaggggggatattgttcgcagaaagaaccccatgcgacctttgcagcgatggtttatcgtctggatgtctatgtcggacaagtggtcgagcggctcaaatcactgggtttgtacgataatactttgattgttttttgtagtgataacggtccgcatcaggaaggtggtgccgatcctgattttttcaatagcaacggtatttaccgggggtataagcgtgatttgtacgaaggcggcatccgagtgccgttcatcgtcgcttggccgggcgtggtcgcagaggggcagaccgattttctttgctcattttgggatatgttgcccacttttgccgatttaacccgtataaaacagaatggagctaccgatggagtcagtctgatgccgttattgatcggtaggggcaagcaaaaagagcatccgtatctgtatttcgaatttcatgagggaggagggcgacaggctgtccgtcagggggattggaagttggtccgtttgggtgtatcgcagagtgaagataaagttcggactgaattgtacaacctggctgccgatccgtcagagattcatgatgttgccaaactttatccggataaggtagcagaattaatggagattataaaatctgagcataagtcggatacaaattggcctttattaaaaacagagcgcgaacaattgcaaaagaattaatctattttaaaacgttccaatgtataaaatgattatatttgctttattgtcaaacacaacatttacattatgaacgcaaaatttttattaatgggagctttggtcgtagcgctggcaggctgcaaaggttctgcaaccaaaaattcgacacaagccaaaacaacggaggctgcaaccgaagtggcaaccaaggccaacgatttctatggcacatatgaaggaacgcttccttgtgcggattgtgaaggtatcaaaacgacccttacggtgaatgccgattcaacctactatctcaagagcgaatatttgggagtaaaagacggtatttttgaaacaaacggagtttataatctcctgaataatgatttgttggaattgattactccctcttcaggagaaaagacctattacaaaattctggaaaattctgtgatgttgtctgatgaaaaaggcaccattaatgagggtgaacttgcagaatattatgttctgaaaaagaactgatattgtagatatattttgtcaaggatataaaagccaactgattcctgaacggacggttggcttttttgatatatgcttgttccgtctgtgaacatctccgttgtatctccagcctttcctcttctcaaacatattttaaattcatgtcaaatagtagtcaaagatatggttttgttatctttgatatatatttgtcatatagatgacatatttttgatataaatttaagtgggaggggagatagggagaagagagagggggttagttgttgtgtcttttactcgtgttaaatgctgatatgcgtattgtattataaatatcattctaatgatagatatatttgccgtgatttttttcgctatcccaacactttcaaatacttatgagccagttgctgatgttttgtgttataataatttctcggattgttgggaatgctggatgtttttcattagttttgcaagattaactttatgtacatattgtgaatattgcaataaaacagatacaacatggcgatgaacaggctttccgaagtttgtttaatgagtactaccaagggttgtgtgtgtttgcgtctgcctatttgaaagatgatgcgttgtcggcggatgttgtgcaggaggcttttgtgaagttttgggctcgtcggggggatttcgatgatgctgttaaaatcaagtcttttctttataccattgtcaggaacgactgcttgaatatcgtgcagcgtcagaagattgtgcgggaagatatctcagtgattgaaaacaaaggcttttttcataataatttgatagagacagagagctatcgtattttttatgcggcagtagaaacgctttcgcctcaggggaaagaggtaattcaattggctctggacgggttgaaaaacagtgagattgccgaccgcttggggattgccgaaagctctgtccatacacagaaaaagattgcctacaaaaaattaaaggaggctttgaaagactattattatctgctgcatctgttcttgggatagtattgaaaatcaataggtgcttaataaaatagtcaactttccataataaaaactgttctttttttgctagtgcttgcaagattaccttctgtaaacactcgcttgttaggttttccttgcaattgggaacaagagcctttatggagataaggattttctaaaatagaagaagtaactggaattcgatgattttagtcaaatgtccatagtggaaaatatggatttaacattagcgttcccgtaattaagctttgaaaggtctggaaactctttcgaaaataggtgcaacattttttttgaaaaaaagtgggaattggcttccccataaaaatgcttttttgtgttttattataaacggaggttgttataaagaatgaaaaaggcatgaatacagaaaaggattttgagatagcgaaaaagattgcccatgtattgtcgggagattgctctgaggaaaacaagagcagtttggatgaatggttgtctgagtcggaagacaatcgaaatctttatgaacatattttagacgggcgcaattgcgaaaaatatcaaaagaaagcggctgagtttgacaagacggtcgggtgggaaaaattatcacataaacgtcatcagaaatctgcaggtcgacaaatacagatgcgtcgtcggtttttgcgttgggtagcagtcatatcattggtttgtggaatgggagttgcggcgaggttgtattgggagcaaaaaatggaaaccgaaaagcaggtggcacaaaatgaagtggtgcaaggtggtacgcgtgcaatgttgactttggcggatgggaaagtggtggacttggaaaagaccaaggggggaatcattgaaaagcaatcggcaacaaatatatataatcagggagataatttgatatatgaagacagtttggtgcaaactgtcgaagaagtggtttttaataaggtgactgttccgcgtgggggtgagtttaaactgacccttagcgacgggactgttgttcatttgaatgcggagaccgttttgagttatccggttcgttttgttggaaacactcgtgaagtggaattgcacggagaggcttacttcgaggttgctaaagatgcagcaaaaccttttatcgtaaaaacttcccgatataatatcgaagtattgggcacacatttcaatgtggcggactacgaaagtgatgctttggtgcataccactttggttgaaggtaaggtggctgtgtcgggtccgggaatccgtcaacgggtattgcagccgaatgagcagtttgtattggataagaataccggaaaacaagatgtgaaaactgttgatgtcagttatctggtggcttggaaagattctcgtttccgcttccgggatgtccgtttggaagatattatgcacgctatcgaacgttggtatgatgtcaccgtattttatgaaaatcaggaagtgaaagattatcgtttcgggttcaatgtaggacgtgacgaatcgatagatcctcttttgcgcatatttgaagctaatggaaaggtaaaaatagatagaaatggaaaagttttaaggataaggcgtggtagataaaaaagcagggatgttgcagcatccctgccgattgaccattttgctttgtcaaaataatcaacataaaaattaaattacaaatttatgaaaaaattgcgacttatgtttagatggacatttgtatttgttctgttgggaatgttgcatgttcatgcaaacgtttaccctcagaacgggcaacaggttaggctttctatgaaggaagccagtctgaaggatgtgctttgggcgatagaaagccagacttcgtttgtttttatgtataatgaagaagacttggataaaatcggtaaggtggatgtggatgtacaaggggatgatatccggactattttgaatgcctgcctgaagaacaccgacttgacttatgtgttgcaggatgaggtggttgtgataaaaccggcaattcctcaaaaaacggtaaaggagttggtgctgaaagggaaggtggtcgatgaaagaaaagagccgttaccgggtgtaaccatattggtgaagggtactaccgtgggggctgtgaccgatgccaatgggcagtttactatgactgtgccggaaactgctcacttggcattggtgttttcttttatcggtatggagccggtggaagttgtttataaggggcagaaagagttttatgtagtgatgaaaagtgctaaagaggagttggaagaggtggttgtaacgggatataccaagttgagaaaagagagtttcaccggtaatgcaacgactgttacaaaggaccagttattgaaaacgaacaataacagtgttattgaagccttacagacattcgatccttcatttcgtattaaagagaattcgatttggggttcagacccgaatgccttacctgagtttactatccgtggagaatcaagtattgcagttaataaaggtttggattatgagcagcagcgtcgggaacaacgaacaaatttgaaggataatcctaatcttcctatttttattatggatggttttgaggtggatgttcagaagatttatgatatggatatcaatcgcattcagagtatgacaattttgaaagatgcggcagcaacagctatgtatggttcgcgagcagccaatggtgtcgtggttgtaactactgtagctccaaaacccggagagttgcgtgttacctataatttctccggtggtgcggaattgcctgatttgtctgattataatttgtgtaatgctcgggaaaaattggatgtggaagtttttgccggaaagtataaagcagaaagtgaaagtcagcagatctataaagacgaggagtataataatgctttgaatcagattttgcgtggtgccaatactgattggttggctcaacctttgagaaatgtattcaatcataagcatagtttgaatgtacagggtggtgtcgagagtgtgcgttatggaattgatttaagttatgacagtaacaatggagcgatgaaaggttcttaccgcagtcgttatggtgccggtttgacattggatttccgtaaaaaagagtggttgcagattatgaatcagatctcatataattcgactcgtatggaggattctccttatggaacgttcagtgattatgctgctttgcagccttattttatgccgcgtgatatgaatggtgagctggtacctgtatttagcgacggtaagtcgaatccgttatggaaagttgccaatttgtataattttaccggtaagggttatttgaacgatttgacagaaaatttcagtattaatctatttttctttaaaggtttttcatttaaaggtcagtttagtataaccaagacagattcacagacagaaacatttgtggatccgagtgatccttcttttgctggtgctccggatagggagaagggttctttgcttcgttccaccagtaaggattatcgttggaatgtgaatgctatgttctattacaatcaggctttgggcaaacattttattaatgcgacccttggtttgaatgcttctgaaaatgaatccgagaatacagcattgtcttttcggggatttcctttgggttcgctgaacaagccttcgtatgccgcagaagaggctcaaaaggctatggtatctccttccaagaaacgtttggtaggatttttgggttctgttaactattcatataacgatatctatctgtttgacgcatctttccgtctggacggttcgtcttcttatggagaggataaacgttttgcacctttctggtcggtaggtgccggtctgaatattcataattatgcaatgttcaaagacagttggtggttgaatactttacgtatcagaggaacatacggtgtgacaggtaatgcaaacttcccggattatgctgctgtgacaaaattcaagacttctacagactcatggtattataccggtccggcaaatagcttgatatttttgggaaatccccagttgacatgggaaaagaccaaaacggtggatttgggaatcaatttaggtttgtttgaagaccgtctctatattgaagctaactattatcacaaacagacagaagaccagatttattctcgtgatgtgcgtccatcttccggttttaccaccttttattccaatgcgggaacaatcttgaacgaaggatttgaaatcaatatgaatgcaactttattccgtaataaggattggaccgtgtcaatgaatgccaacctagctgcaaataaaaatacgattaaacgtttgggagcggaaatggaggcatacaacaaggcgatcaaggataattatgagaataagatgagtagctatcctgaagagttgaggcaggagccggtaatccaatattatgagggtgcatctactacatccatttatgcagtgcgctctttgggtattgaccctgccaatggccgtgaaaaattcttgaagaaaaacggttcgacaacctatacttggtgtgctgaggatatggtggtttgtggtgatgaaaatccggatgcacaaggatcatttggtttgaatgtagcatggaaaggtttttatgtgaatgcttcgtttatgtatcagtggggtggacaggcttataacgaaacattgttgagaaaagttgagaatgcagatgttatcggctctaatgttgaccgtcgtgtgttgacggaacgttggaaacaggccggtgatgttagtccatattatgatttgaagaaaaatactcaaacatctcctacttctcgttttgtacaggatttgaatgtgttgaatttcagcagcctttcctgtggatacgatttccagtattccatgattaagaaaatcagattgaattctttgggaatcagatttaatgccaatgatttgtgccgttggtcaacagtgaaggaggaacgaggaacaagttatccttactctaaaaattatagtataacccttactttaggattttgataaaattgcgaattatgaatatgtggaaaaaaataatggtcatcagttgcagtctgttttttgcttcttgtaacaactggttggatttacaaccggagggagaggcttctgcaagtgatttgttcagcacggcagatggttatcgttctgtgttgaatggtgtttataaagcaatgggtacggctccgctgtatggtatggagttgcagttcggtatggtggattgtatggctcaggctgtgaaaccatatagccagtcagatgagacttgggtgaaaacgtatgatgcagtgcgtgcgtatgattatgcaaatgtagatgtgaaagcgaaggtgaatcagatatggggaacagcttttaatgcgatagccaatgcaaatgtgttgatccagaatgtcgagcatgcatcttctgatttatttaagatgggcgataccgaaagaaaaatgattttgggtgaggcgtatgcttgccgtgcattattgcattttgatttgttgcgtctgttcgctccggctccggtgaacgacgatggtggcaattatgtaccttatattgataagttcccggaaattttaggaactggcattagcgtgccggcatttttggagaaggtggagaaggatttgttgttggcaagagagcttgtggcagagtttgataccgcaacgatcttgggacatggtgtgaatgcaagtggtgaaagccgttttcacaatgaactggatccgaatattagcggtcagaatacaagtgaaagtgtggatgatttctatcaggggagaggttatcgtttgagctattattctatttcagctttgttggctcgggtttaccagtatgcaggaaagcatgagcaggcattcaatgaggctaaaaaggtgattgaggcgaaagttccctatgtgacaggcggtgagactgagttgtatagagatgagtttgatggtttttgggatgataattgggagaataggcaagatttgaaaagagtgtccagcttgatatttgctgtatataatgaaaacgcttatgagaatgaccagaatggcttgaacttagcttcctattttatgaagaggtctagtggaatgcagtcgggacggtggtttgtgattgagactgtggtacagaaaatttttgaaacggctggaggtaaagcggaagagggagatttccgttgcaagaagatgatttataaggctgatggtcaatttgaaatttccggtaaatggtatttgagtgatgatgtgaaaatcagggataagcatttgacgatattgccggtcatccgtttgactgaaatgcaatatattgtggcggaatattatgcacggagcggtaatttggcggaggcttataaagtgttgaatgatattcgtcaccaaagagacttgtgggaagatttgcagatacaaaatgattataatgcttttcagaatgatttggtgagagatgcccaacgggagtgggtatcagaaggacagttattttatctgtacaaacgcttgaatgctcccattatccggaatgtaaacggtgatgccagtatattgcagcgtaacgaggcaatattgccgataccgactgaagaaagtaattaattgtaaatgattgtgatatgaaaagaatatattattctgttatgatgtttttgatagcctctcttttgtttggttgtcaaacggatgatgtgaatgtttttggagaggagcatgaggtttattttgagaagttttggatgaatgccgttgctcccggtacagaacaggcggattctacgaaagtgacttttttctttgaaccggaggacagccaatatgtatatgccgatttggttgtttgtctgtccggaagagctttgacttcggaagtcacctttggattgaaggtgattgaggagttgtcgacggtaaaaccggagaattacgaactggacgatcattatacattccgaccgggaacttttgtggagggtgatgtggaaataaaggatacgattcatgttaaactgaaacggagcgagtatttggctcaatctaaaaatggacttcgcatggtggtggagttggttccaagtcggacaacgggagtgggacagtatgaacgtagccgggccattatctttttgacagatgatgccgtgcagccgttgtggtggaatgaagaggttacgactgtcttgttgggcagttattctgcaacgaaatataagctatttctgaataatgtagagggggcttataatttggacgaaaagatgatcaaggagagtcctgaccaggcaagaaaactggttctggagtttaagaaatggttgagtgcgcaccccggacaaaaagatgagttcggatatgatataactcttccggtatagtataattttataatattgaatatcatgagaaatataatattgactttgctgtttgcaatttccttgattggttgttttgaagatgaaggaaattatgagtacaaggagttgaaagaaccgttgtggttgtttgataaagaatcaatgaatattgatatctatgctcgtatgggtcgcaatgtgctttttaaagccagcgaccggtttacctggggtgaagattcgttggtacgccttgatgaggtgagatttgaatggaggataggggacgttgtgataggcgatcaggtggattttacaatatctgccgaagagcttgtgaaaaaattgaatctggagaaattgccggatgaaaataatgcattgaaaggtacatttaggattatagaaaaggagagcgatattacctatatgtgtcgtttccgtttgataattaatccttatatttcgacttatgattggattatcatgtcagagatgggagaagaaacgaagttgtcggtggcaagctggtctaaaaatccggagacagggaaagattattatgaattgatgaaaccgaatgacaacgtcaatcatgaattgttgttaccaggtaaacctattgatgcagcattttcaattgcgagacatgtcggaccgttaggttctgtaaccgctattacggacaagggggtatatgaaattgataatacgaaattggaagtgtatggggaattgaaagatgaatttttggatggtactccggctgattttaatgttgtggcgagacgtgatattgatggtttgggagagagacggcctcacaatacatttttggctacagctgatggtaatgtatatacacgacaaatgtctgctaattggttgggcggtaaatttttgtcagagccttatattgtcgatgatagaggatataagattaccagattcggtcatactttgtttgacaatccgattattccttgttttgatgaaaagaatggtcgtatgttgatggctcaggtttgggaagaaagggttggagataatttgacaggaagttatgtgtataaaagccgtttgattgaaccgaaaattccagcgaatgcggaagcgggacaatatacttcggtgtggaatatgccaggtgtggaaatgttgtttgttacggctgcatctcattttagagcaactggaacgcaatccatttatactttgctttttaatgatgccagtggtcagactctcttatgggattttgttatcgataatagaacgatgtcttatgtcgaaaatatggaggcttatatgcgtatgatgtttgatcaggtcttgccggttaaattgaataagaatatgaagttcctgacatcttgtaatgcaagtcgtttggcttcttccgcagccaatcgtattgtctatagcaatggtaatgaggtacgttttatcaagcggggtacatattggtatggaatgatgacagaattgagcagtgacaattttttgttgcgtgtggattctccagtaacttatttgacttatgattatacctgcttcgattatggtaacgtgataatgatggtcggttgtgaaaatggagatgttttttattatgatattaccaatacaagtcgtcctgaattgttgtgtaaatttaatgtaggaggtaaagtagtgtctgcaaaattgatgggaactccacgtacgacaaaggatttgtattaactaggtagggataattagattatggaagagacaatagtaaaagtagaccacctttcgcatcgttatagtgtgcagtgggctattcgggacataaattttgaagttccaaaacatggaatatatggattactcggctccaacggagccgggaaatccacaacgatgaacattatgtgtggtgtgttacggcagtcggaaggagatgtttatatcaaaggaatcagcatgagcaaaaatccggtggaggcgaaacggcatatcggctttctgccgcagaatccaccattgcacatggatttgacggtgacagaatatctggaatattgtgccggcttgcgttatatcccggatcgggagatttccaaagctgtaaagcaagtgctggaacgttgcggtatcagtcatttcagtaagcgtctgcttcggaatctttccggaggataccaacagagagtcggcatagcccaggcaattatacacaatccggatttcgttgtgttggacgagccgaccaacggacttgatccgaatcagattttggatgtccgccatttgataaaggagattgcagaagagcatacggtgctcgtttctactcatatcctttcagaggtgcaggctgtttgcgaccatatccgaatgattgagcaaggacggttggtgtttgccggaacggtagaggagtttgataattatattgtgccggattctttgtttgtttctttaatggccatgccggctgtcgaagatttgaagagagtgccgggtgtgttggatgtcgaagagttggggggaccgaattaccggattaagtataaggatttccaggaggtgacagaacgactcgtagaagccagtgctgccagaagttggggattgactgagttgagacaggaaaagagttctatgaacgatatttttgctgagttgtcaaggaaataacgaattattctatacagattgtcatgaagattatttataaaattgcaaaagcggagttacaatcgcttttcttctcgcctattgcctggttgatattgattttgtacactttccagacaggaatagattttgccggtcttatcgatggtgtgatgaagagtaaagaaatgggatatggagccacaaatgcaacatccagatttttcggtggttgggatggtgtactgaccattgtacagggatatctttatttgtacattcccttgttgactatgaatttgatgagtcgtgaattgggaagcggttcaattaagttgttgtattcttctccggtaacaaatgtgcagattatcttgggaaaatatctttcgatggtgatttatgcctttgtattggtgggaatattgttactctatgtaattatcggtgcctttattatcaaggattttgattatcctcaggtgtttaccggtctattgggtatttatcttttgatttgtgcctatgcggctataggcttgttgatgtccagtttgacttcttatcaggtggtggcagcagttggtacgttggcagtgttgtcgctgttgacttatgtgcaagggtggtggcaggatgtcgaatttgtgcgagacctgacgtattggttggcgatgccggggcgttcgcaggagtttttgtccggaatgatttgcagtgccaatatcatttatttctttttggtgatagcgttgtttttggcaatggcgattattcgtttgcaatccagaagacagaagagcaaatggacggttacttggggtaaatatttaggaatttgggcaatcgcgttgttcatcggatatgttacttctcgtccggtttttagaagctattatgatgctactgctatgaaacagaatacattgacacctaatagccagaggattatcggacagatggatggtaagctcaagatgacaacctatgtcaatttgttggacaagtatttctggattggtttgccggctcgtgtaaatgaggatctgaagcttttcgagcagtatgtgcgttttaagccggatatggagatggaatatgtgtattattatgatactccaagtgtgccggcttatcgtgaagagggaaatctgacaatggaagagcaggctcaaaagatgatgaaaatcaatgacctgaatccgaaattgtttttgaccccggagcagataaaggcgaaaatagatttgtcaggagagcaaaatagattagtgagagagttggaatacaatggcaagaagactttcttgcgtatttttgacgataatatgattttcccgacagaagctgaaatttcagcggcattgaagcgtttggtgatggatcttccaaaagtgggtttcttgcaagggcatggggaacgtgctgtagacaatgtaggagaacgttcttacagtatgtttacgcatgctaacaatttccgtcatgctttgattaatcagggatttgattttactgaagtgattttggatagaggtatccctgaagatatcaatattttggtagtagcggatatgaaggagacattgaatgaacaggaacagcaatattttgatgagtatattgctcgtggaggtaatttggttgtgattggagatcctaaacgtcaggaggcaatgaacccgcttattgcttcattaggggtgcgttttatgccgggatgtctggttcatccgactccggagtatgattcggatttggtattggcccagcctacagaaggtgctgcgaaactgaattattggtttaatcagttgaagtattatggatatggaatagctatgccgaatgctgttgggttggaatatacagaggataagggatttgcggttactcctttgttggtgagtccggaaaaaggcagttggaatgagttggaaacagttgattttgttgacaacaaagccgtgctgaatgtggaagccggagaagtggaacaatcttatccgaccgctttggctttgactcgtaagatgggagacaaagagcagaagatactaattttaggagatgcagattgtgtaagtaatggagaattactgaaggcacgtccgggcatcaatgcctttaattactatttgatagctggaggattctattggttatctgatgaggaagtcccaattgatattcgccgtcctcaggctcctgatgatgaagtgttcctcagcgaaagctctgcttctatacttagtacattgtttgtgtgggtattaccttgcttccttcttttgtttgcattgtttatttggttgagacggagaggcagatagtagaatctaaaatagacattatggcttttattatagatagacaaacgataaacgacctgaatatctttggtaaggtccgcggtaactcggtgtatggggtgtttaacagcacccgtacacgaggtggagcacaattgttagaagagatgttccattaccccctctctgatgtggaaagaatcaaccatagaagtactgttatccgttattttatggataagaatgtacggtttgatttccagaatgagtggtttgatgcattggaaggatatttggcaaatcgtgatgagcgttccagattgatgccagaagacaatactttgcagcggagagtgaagagatgtataggaggggacatggaatttgaacaagtgttgaaaggtgtgtcggcaggaatcaatctgcttaatactgtcaggagttttcttgctcatgttgaaggagataacaatccttatgctcaagaatgtaaagagttggctcaattggtggcagctcctcagttggcttggactccggaggaaaaaggtaggacaaaactgtcgtatgcaaagacttccaagtatgatagtcttttgcggtatgaggggtatgagtcaatattgaaaatccttcgttacctgtatcagatagatgcttatatctcaattgccgaggtggctagagagcgtggatttgtatttgctgaagccttgcctttgggaggcaatattcttgaaatcgagggtatgttccatcctttgatagaaaaggctatccccaattcgatacaggcagatgcagagcataatgtagtgttcctgactggagcgaatatggcgggtaagtctacttttatgaagacattcggtattgtgatatatttggctcacatgggcttcccgctgccggtgaagaaaatgcgtttcagtgtgcaaaatggtatgtatacgactattaatttgcccgataatatgatgcttggttacagccatttttatgcagaagtgcagcgtttgaaaaaggtggcagagcaggtggggcgtatcggtcatctcgtgattgtattcgatgagttgttccgaggtactaatgtgaaggatgcacatgaggcaacacttgctgtaatggaggcatttgcagagaagaagaattgtatttttatgatatctacacacattattgaggccggagaggatttgaagaagcggtgtgataatatcacttatgtgtatcttccgacggtgatgaaggatgggcgtccgacgtatacgtattctttgaagccgggtattaccaatgacaggcatggtatgatgatcgtgcgtaatgaacatattattgatattttgacgcagaaatcatgagttttacagtagataagcagaccctggatgatttgaatctcttgggaaaatatagaagcaattctatttataatgtgtttagccgcactcatacgaggggtggtgagatggtgttggaacaaatgttccgtcatcctctttcggatgctgacgctattaataaaagaagtgctgtatttgaatattttcagcagaaaaatttggagtttccttttgatagaaagcttctggatgctgtggaatattatctgagtactccggcccattccaagaaggctgtcagttatttgaataatggcaaacgtaagttgatgcagtgcatagctgcagaccaggcttacgagctgataggtgccggagttgttgcctctatccagttgttggataaagttgaatatttttatgccggacttgacgaagggaacggtgcttatagtgcgacgatttctgaggtgatgaccatgttgcatagtaaagagtgggaggaattgaagaagttgaagggcgtggagcaattccctttccgtcgtttggtgtattatgattattgtttgcgtgcgcaaggttatgagaatttgagacgtctgatgaatattatatatgaattggacgtttatatgaccggtgcggctgtcgctgctcagagaggtttctctcgagctgtggcatatccgttgtcaacgactgacaatcgtattgatttggtgaatgtctttcatccgcaggtgcgcaatgctgttgccaacagcatttgtatcagtcataatcaaaatgtgctttttttgaccggtgcaaatatggcgggtaagtctacttttatgaagtcgtttggtgtggcggtttatatggcgcacatgggtttccctgtggcagcagaaaagatggaatttacggtgcaggatggattatatacctccattaatgtatctgataacttgaatatgggttacagccacttctatgctgaggtattgcgtgtgaagtttgttgcaagcgaggtggctgccggtaaaaatatggtgataattctggatgagttatttaaaggtactaatgtaaaagacgcttatgatgccacagtggctgtcattgaggctttttctattcaccagaactgttcgtttatcatatccacacatattttggaagccggacagacgttgcatgagaaatgtccgcattttaaatttgcatatttgccgaccgtcatggaaggaagaataccgcgctatacttatcgtctgactgacggtattactgcagacagacacggtatgcagattatcaataacgagcatatcgttgacatcatcaggaatggaagtagaaagataggataaaaaaaaggctgactttcaagtcagccttttttaaactatttagtgataagtatctactaaacgtgtccttgagcacacatagcgtcagcaactttgatgaagccaccgatgttagcacctttaacgtagtcaatcttgtcgccagtttttccgtatttcacgcaagtatcgtgaatgtctttcataatctgagacaatttctgatcaacttcttcagctgtccagctgtaacgcatagagttctggctcatttccaaacctgatactgctacaccaccggcgttagctgctttacccggagcgaaagtaatgtgagagttcaagtagcgaacagcatctgctgtacatcccatgttagaagtttcaacaaccatctgacagccgttagctaccaattgttttgcatcttcttcgttcaattcattctggattgcgcacgggaatgcgatatcacatttaacttcccaaggtttgtgacctttgatgaatttagcaccgaatttagctgcatacggttctacaacgtcgttgttgctagcacgcaattccaacatgtatttaacgccttcttcagtgatacctttttcatcatagatatatccgtccggtcctgagatagtaaccaatttagctcccaattgaactaatttgctggcagcaccccaagcaacgttaccgaaacctgaaatggctacagtcttgcctttaatgtcctgacctttttctctcagcatgtgctgtgcgaagtatacggtaccgtaacctgttgcttcaggacgaacacgtgaaccaccgaattctcttggtttacccgttaatacaccaacaaattcattgcggattctcttgtattgtccgaacaaataaccgatttcgcgtgcacctacacctatatctcctgcaggtacgtcagtgtcagcaccgatatatttgcaaagctcagtcatgaagctctggcagaaacgcataacttcattgtctgattttcctttcgggttgaagtctgaacctcccttaccaccacccataggcagagttgtcagagagtttttgaaagtctgctcaaaacctaagaatttcaatccgcccaatgttactgacgggtggaaacgcaaacctcctttgtacggtccaatagcgctattgaactgaacacggtaaccgcggttgatctgaacttcacctttatcgtcaatccaaggtacacggaacatgattactctttccggttctaccattttttccaggatcttgtttgctttgtatttcgggttagcctgataggtatcccaaacggtttcaataacctcttctacagcctggtgaaattctgcttcgcccactgttcttgcctttaaggcatccatgaattctttaatctctggtctcatttgtataatttttagtatgagtatttcaaacgttttcgcacgtcaaaattaggaaattatttttcaacacaaaactttttcagattaatttttctttaattgctgcctttattactttcagtttgatattaaaaaaagcatttttattgataatctgttagtatgaattggaaatattattttttcgttgtgtatttttgtcccggtaaacttaaaatcttgccttctaattccaattgtagcagtaaagccggcagtgtcccgtctgttatttggcttatttgcgctaattggtctatgtgtaaatcgccattttgacggagtagtttgagaatttgttcttctttatcggaatctccgaataaatccagttttaattgttggtcttctattgtacgttcaggataacctaatatccggacgatgtctttgcagttttcaaccagtgctgcaacattttctttgatcaaagcattgcagcctgctgagtagggatcatccggtcgtcccgggaatgccataacatcccggttataagataaggctgtcctggcagtagacatggctcctcctttaacagcggattctgctacgagtgtggcttggcacattcctgcaataatccgattgcgttttaggaagttgcttggatgggtgctggcaatgcaagggaattcgctgattaatgctccgttggattctaatatggcatctgccagacgtttatgggatgccggataaaccatgtgcagtccatgtcctaagacggcaaaggtacgtaatccattttttagactggctctatgggctgctgcatctattccgtaagctagaccgctgacaatgataggatgatggcccatgagttgcaaatctgtcaatacgatattcactaagtcttggtatcttgtagaagcatggcgtgtgccgacgattgccagatgtttgtcttcgctgcaggtttgtatattgcctttataatatagtgtcaaggggatatcctcacattgttttaacaggataggataactttgatcttctattgtacatatatttatatggtggcggtggatttcttccaattcccgtttggcgttttccagagcctgggtgcggttgatttgttccgggagaatgttgaatgttctacaaatagcgttgaatgcttctgtagattcacggaaaaatccttctatgccgccgcatttgtcatatatagggaggcataagttgctgtttaatttgggaataaaactggtcgcaacgtgtgcttgtacagtgctttcaatattcatattatttgaagttgtaacaataaacgatatcaaaattatgaattttaattggagaagaaaacccttttgcaaatatctttttaattttgcttcaaattgagtctgttatggatagtattatatttacccgtgagagtggcgttgcattaaagcggttgttgcaaaatatttcgtcatcggatatttatttgttgatggatagtaatagtcggacttgttgtatggagcatctccagttggatttgccagcctgcaattgtattgttttggaggcgggtgaacagtttaagacgcttgagagtgtgacggaagtgtggaaagtgctgtccggtaattgtgcgcgccggaattccgtgttagtgaatttagggggtggaacaattacagatatgggaggatttgcagcgtcttgttttaagcgtggtattgtttgtgtgaatattccgactacattgttatcgcaggttgatgcttctgtaggcggtaaaaccggagtgaattttaatggactgaaaaatgagatcggcactttttctgtgccccgtcaagtaataatcgataattcttttttgtcaacgcttccttatagacaagtattgtccggttttgcagaaatgctcaagcatggtctgttgtccgatgaggagcattggacagagctgatgcgggtggacttgtctaatgttgacagaatcggttttttgacattgattcaaaagtctgttgccgtgaaaaatgcaattgtccggaaagatccttgtgagaaggggattcgtaaagctctgaattttgggcatacggtgggacatgcaatagaaagtgtagctattgatcgtcatctggatatttatcatggagatgctgtagcttacggtatgattgctgaactttatctttctgtgaagaaggtgggatttgataaggagttgtatgaaagtatccgtagctttattcgtgaattatatccttcttgtgcgtgtattgataatcgagagaatctttatcaattgatgcttcacgataaaaagaatgaacatcctggtgtgaattttactttgttacaatcaatcggtgagtttgttgttaatcaatattgtgaacgggatgaaataattgaagcgttggaacagatttaatttgaaaatttcttggttattagatttttttttcttaatattgttgtatctaaaaaatctcagtatgagaagatgtgtaatattatcggtcgtgttttccctattgattgtattagtatatgctgatagcgtacagaaagatgtttggggaacggatattccttatagcccttccattcctcaagaacaagatacgtggtgcttctatgccgtgttggaagtttttactagtttgagacaagcgtatattgctagtcgatatcaacgttttttgcaaaaggtggagggagtggaacctatagattgtgaggcttcacctcatttgtgcggtggggtgaagtataaacatattgtcagtttttggaatgatataacgcatgacagaaaaacggaattagaagctatttccggtacttattatctcggtacgagagattctgacgttgctttgcctcgaccaggcattattgtaaggtcggataagagtgcacatgctgtggttgtatattatgttgaaatatatcataatgaagcaaattcttgtgtcgttaaatataacgatcctatgacaggtaaagaagagtggatgaataataattgggggccaattaatatacgaattttgaaataaccttaaaatcccattgctatgaaaacattgatgagtatcgtgatgttgcttctattatttgcttgtgtgcaatataaaaaagaagaaccggtccaatattcattcgaggagattggtcaggaaactgcagagacagtacagatgattgaagatatcaaagcttttcatgaatctttattacaaacaaaaagtacgggaagagtacaggataatttgtataatcgtttttttgcttcaatggatgattacaattattacaaacttcctacttataaattggatattcaaaagttatatgctaatcctgatgtaggacagattaagaattgtattgttcctgcagattttgtgaatgttattgcggttaaggatggaaaggctgatatacgtttgaagtgtaaaaaaataggggatcgttgggttgaaattggtggtacttgtgaatatggagatgtaatcgggtggatacgagattctttggctaatgcaaatacgaaagaatataagattctaatagtgggagacatggagtttgttacatataacaaaggtgggaaggatttatattttaatgttagagggcgttcttttttgccagaagaattgtgtgagtttgttgtgaattgttgcaataatttttgggaggaatgacaggagcggaatctttaataattcatttgccggcttctaaaagtatttcgaatcgagtattgattattaatgcaatggcagatggagtgctgatgccggaaaatttggctgattgtgatgatacgcatattatgaatgaagtgctcaattcttccgatgattgttttgatgtcggacatgctggtacgactatgcgttttttgacagcttttctttcccgtattgtagggcattggactttgacaggctctttccgtatgttacagcgtccgataggacctttggtggatgctttaaaccagttgggagcacgtattgaatatttgggtaaatcgggcttccctcctttgcggatagtcggttctattcttatggggggtgagatcactatttctgcttctgtcagtagccagtatatctcggctttgatgatggtggctccatatatggttaatggacttatgattcatttgaatgggaaggtggtttctcgagcctatatagagatgaccatgcgagtaatgcgtgattttggcgcacgggtggattgggaagcagatggtatccgggtattccccggggattatattccgccggatgtttatcggattgaagctgactggacggctgcttcctatttttatgggctgtatgctgtatctgaaaaaacacagccttttttgctgtctggtctgatggggaatagtattcaaggtgatgcgcagcaggtttcgttgtgggaaaaattggggattgtttcgtcattcgttcaagagggggctctgctttccaaacagccgatgcaggtaaaaacgttggaatatgattttacttctatgcctgatttggtacagacttttgcagttgcttgttgtttgttgaatattccgtttacgttttggggagtagaaactttggtgataaaagaaacagaccgtctagcagcccttgcggttgaattggctcgtttaggcttcaaggtggaagtttcttttgatgacacatgtttgtattggaaaggagagagatgtccggtagaggattcttttagtatacgtacgtatggagatcatcgtatggcaatggcttttgctctggcaaaatcaagatttcctactcttgagattcaaaacaaggaggtggtctctaaatcattccccggtttttgggaggaattttcccgttattgttcctgctttttatagattgtttcccttttttcctcttttctgtgcaaagaagtcttttacaatctgactgcattggtttggtaaaatatctcgaataacaatggttttggggtgtagaacagatggggagagacgggaaaatccccgatgggagtctggagctccgattactaacgttcctaattgtgcccatgctaaggctccagcacacatggtgcaaggttccatggtaacatatagggtgcattcgttcaaatatttgcctcctaagtatgaactggccatggtaacggcgagcatttcggcatgtgctgttacatcgtttagtttttctgtttcgttgtgtgctttggctataattctatctttgcatacgacaatggctcctacgggaatttcgccttctttcgcagcctgtttggcttctgccaatgctttttgcatatattgttcgtgaatgttcatgctgcaaaactttatgaggcttgttttatattgtgatggatagtagatagtacagaccttttagtttttcacgtaattgttgccgccctctttttttgtatgatttgacagaatctatggttagggataatgcttgggctatttcctcatcgctcttcgaggaaagagatagcttgaaaattttttgcatgacaggagaaagagaggaaatggtgttgtttaataaatagtagacttcttcttttattactgactcttcatagtattcctctgtttctttatattctaggatatattctgcaacgacttcttggtgtctaaggtggttcagacatcggtttttgatggttttaaatagataggattttagagctatgattgttggaaattgtttgtgtgagcaataaaattcaataatgatatcattgataatgtctttgatgtcttctggatttgtaatatattttgatgcaaaagaacatagaatttgatagtattcttgatagaaaagtgaataagcggattctttcccttcagcaagagcttttaatagagtttgttcttttgtaaccatatataattccagtgtttacatgtgtgtagtttaggcaaaagtataaaaatctatattggaagacaaaataattgggaaaagtttgacacttttttatatgataagtgttatacttgatgtataattttaatgaaaaaatgaatattgcgaaagtaatatacaaacagataataggagatacattgactgaagatgaattgttgtttttgaaaagatggatgaaaaaatcaaagttcggtcatgatgtaatggatgaattttatgaggaggagtattgggaacaagaaaaaaagaatcatcagttgtggtcggtagaagaagggataactcgatttcgtactgcaagaaataagattgtacggaaacgtgtgtggaggtggcttggtggtgtggcagctgtagtattggtttttgtgtcagttgtcttgattttgtcgaatgataaagatgtgattcctttaaatcctgctgaaatttatgcgggtacaggtcgtgcatgtttggtgttgtcggatggaagaaatgtagagttgacagattcgttagaagttggctttcaggaaaacgaagcgattgttaatgttgtcgggaaggaggttgtgtataatgttggtgatacggttggaatcgaacgttataatataatgagtacaccttgtgggggagaatttatgttgcagttgtctgatggttcacgggtttggttgaatgctgcatcgaaattaaagtttccagtttctttttcaggtaaaaaacgtgaagttgagttgataggagaggcttattttgaggtgcagaaagattctttacgtccgtttgttgttagaagcggtgaagtaagtttggaagtgttggggacttctttttctgtagcatcttatcatggagaacctttctcagcagtattggtggaaggaagtatatgtgtgacggctagtcaaaaagagtgtattttaaagcctggcgaaaaaatattgtttgaaaatggtcgtttatccgtttgttctgttgatgtggatttgcatattgcttggaaagataagtgttttggttttgaaaatgcagttttagaggaagtggtgcagatgttggaacggtggtatggtgttgattttctgataatggatgagcaggttcgaggtttacgttttaccggtaaattaccgaagtatgataatttggataaagtgttggaaatattgcaattgacgacaaatatacgttttgttgttcaatcaaaccgaattgaagtttattctgaataataaatattaattaatctaatatagttatgagtgtaagaaatgtaaagtcgtacgacatttggtgtctgaagcgaatggtttgtacgatatggttgaccgtaacgttaatgtgcggtttgagtttctcttcttcagcagcaattagaggacaagtttattgtactttgaatgtagaacaggtttctcttcaagaagtttttaaaatgttgactaagcagaccggttgtgagtttgtttatagtaacaatgaattgaatgttttgcggaaagtgactttgaatgcagaacatgttgctttgaatgacgtgttggcatcagtattgaaaggttctgggctttggtatcgaatggaagataaggttgtggtgatttctcccaaaattagccagccagtcgaggagcaaaaaagtgtggttataaaaggtactgtattggataaaaacagagaaccgttgcctggagtgacggttctgttgaaagggacgactgtaggagtcgctacggatagtaaaggtgatttctcttttccagtgcctctgaccgaaaataatatagtgttggtgttttcttttgtaggtatggaaagtcaggaggtgaaagtcgtgaaaggtaaaccggtggttgtggtgatgaaagaatcttctaatgacatggatgaagtggttgtgaatggtatttatacggcagctaaaaacagttataccggttctgtgacttctatcagtcaggaagatattttgcaagtatcacagacaaatcttttcaaggctttgactaccttggtgcctggtatgcgtattatagaaaataatgagcagggatctaatccgaataacattcccgaattgttgattcgaggaacgacttcagttgcaacaaatggtgagttagggttgaatacccccttgattatcgtggatggagtggaaacttctttgcaacaactgtatgatatggatatttttgagattgagcgagtggatgtattgaaggatgcttcggcaacagctatttatggtgatcgtgctgcgaatggcgtgattgtcgtggaacgtaaaaaggtaaaagatagcaaattgcgtttgcgttataattttgtgccggatattcagtttgcagatgtttcttcttttgatttgtgtgatcctgctgaaaaacttgaattggaaaaaagatggggtgtttatgaagatgttacaggtaaattacagcaagagtattatagaaaattagagcaaatcaatcgtggtgtaaatactgactggaagtcaattcctttacgaaattcatggtctcatagccattctttaacggctacagggcgtggtggtggcttggattatagcgtgactcttcgatatagcaataaatttggggtcatgaagggcgattaccgtcgtaattatggtatcggattttatttttcttatcattggaaagataaaattactgctagtttccgctcggatttttataaaacggacaccaaaaattctccttatggaagtttctcccagtgggtgggcatgaatccttatgattctccttatgatgaatatggcgagttgataccgaaattatcgtttgatatgccaaatccaatgtataatgcaacgacaggtagcttttttaagagcagaatgaagcagtttgctaatactttgagtttacgttgggatattttgaaaggattttttgtgacggctacagggaacctttctattgatgattcccgtatggatgattatgtctcttctttgcatacatcttctttggataaagccagtccttctcagcgggggttgtattcgttagatggtagtgaaggttggaattggtctgcgcaagcaaatgtaacctattctcatgcttttgatgagcgtggaacgatattaacattaaatgtaggtggtaatttgagacaacgcagtacggatacatgggcgatggttggtgaaggctttttgaaaccgaatatgaattatatttcttttgcacaaaaatattcagagggtagtaagcctacaggaggaaatatttatgcttcgtctgtttctgctttcgggaacttgaattttatctggaggaaccgttattatatggatgcatcttatcgttcgtctgccaattcggcattgggagacaatgagcgttggcgtccttattggtcattcggtattggttggaacttgcataatgaaaatttcttgaaagatttgggatgggtatcgttatttcgtttgagaggaagtgttggatatgtaggtagtggtaattttgatggtaatctgactaatgtaatatatacatatgaaggtaattatgttacaggtttaggagcattgccaagttcattgggaaatcctaatttgaaagctcaacgtactttgagtatcaatgccggtttgacattggaagctttgaatgatcggtttgaagtaacttttgattggtataagcagattacaaaagattgtcttatgccaataggtattccggtgtcgacaggagccagtgaagtacaggcaaatttgggagagcaagagaattatggttatgaattggcaatatcaggtttgattatcaagacacaggactggttgtggcgtctttctgctaatacgcatcataccattaataagttgacaaaaatcagtaattctctgatgaaacaaaatgtcgagaatatgcaggctgaaggtatggcacctaaagtgcagtttgtagagggagagtctacaacttctatttttgccgtgccttcctggggtatcaatcctgctaatggagaagaaatatttgtacgtccggatggaaatatcactaatgtttatcatgtggaagataaggtggcgttgggggataagactcccaaattggagggtagtatttatacagctctcgcttataggggtttgagtgttagtatgtcttttgattatactgtaggaggctatatttataatgagactcgtgcggcaaaggttgagaatattaatatttaccggaatgtggatagacgtgcatttaccgagcgttgggtgaaacccggtgatgttgtgccttatcccatcggacgtttggagcagcagaaaagagccgtacattccagtcgttttgtagaaaaaaggaatgaattgcatatgagttcattgaatatttcctatgatttgcctcctcgttgggtgagaaaaataggtttgaaacgtttggcggtaggtgtcggctttaatgatatattccggttgtcaaccgttaagtttgaacgaggaacttcttatccttatatgcatagttataattttatgattagtcctactttttaatgcataagaatatgaaaataatgagaataaatatattgctatgcctgctggcttttacatttgcttcttgtgagaattttcttgaatcaagggataaagcgcaggtgttggaggaaaaactttttgtgaatcaagagggtgtggaagaagccatgtatgggttgtatttgaatatggggtctggaattttgtggggggctcatatgcctgttgtgatggattgtttggctcagtatttgacacttggaacctattctcaagagaatacaaacggctttgaggaattgatgctgcacaatcatggttcggaacgttcgacgactatatttggtagtatatggactgctggctacaaagtaatcagtgatatcaataaaattatagaaaatctggataattgggaacataaaccattgcggcatatggatttgtatcgtggcgagtgtcttgggttgcgtgcttttatacatttggaaatgttgcggatgtatggttctcctgatttggataagcgtggaattccttatgtgcgaaattatggaatgtgggtgacaccttttagcaagaccggtgaatgttatgataagattttggaagatttgaatgaggctcaccgtttgttggcagaagatgaaaagcttttgacatatccacgtcaggaacttaatacttatgacggctttaccagttatcgggaattacatatgaacctatatgcagtgaaggcattgttggctaggacttattatacaagaaaccagccgggagatatggacagtgtaaaagtttatgcacgtcaagtggtggattctaaaaaatttccattaccaacgaacgagaatgtcggtgctgatcattttatacgtatgatgtcaggtacggtggcgcaggatgaagctgtttttggagtttataagtatgatacctattctgatttgcttactttatttgtgttggataaaggatcttttttggctgctgatgaaaaaatgtatgaagaattgggagaaaatggaactgaccatcgttcaaattggattagagtacctcgtgcggcaacggaagaagattcaaaagaattgggtatgcgtattatgaagttgatcaatgcaaggtctttttattctgcaaatgaagagcaggagccgataggtgatcccggtattaatattattcgtattcctgaattgtatctgatgttggcagaggctttattggaagattctcctgctgatgctttgcgttattataacgactttatttattccaggggattaagtaaagtggaaaaagtaactttagaagatattgataaacagttctggcgggaatatttggtggaagggcaatattggtttcgtttaagacgtcaaaaggtgaaaactataaaagtggagaagaagttggcggcaatcaaaggtgtgaatgaaatagaaatggatgaaagcaagtggactttacctattcctgattcggaattcgagtttcgtgaagatggtacttattaatggtttaaaatgatgacaaatatgagaagaattataataatttgtttggttgcgggaattgtgggagcattggggctttcttcttgcacaaaagatccttgggtatttgatacatctagaaaagcaggtgtttacttgttagacacaagggatagtaatagagtggagtttggaaaatatcttgatacgacctgggcttctcagtcgttagatgtttatctgataggtaaaccggttgattatgatcgggaagtgcaagtggaggtcgttatggaagattctgcaacgaacatggaatatgaaaaggattttcgagtggatccggtgttttttaaagctggagcaacaacttctgtgttgcgttgttgggctcgtatccctgaaaataaggaagatgaaaacggtaaattgcactttacgctccgtttggtagaaaatgaaaattttgtgcctcatttgacgacaaaagcgttttttgcagtatatgtatttcatcctgatatacatattgatgaattatggtggtttgtcaatagacctgacattttcggtccctatacagagaaaggtattaaggtgtttatgaaatattatactaagcagcaacaggaaaatactgaaatctggcaacgttacttgttgcctgtttatggggaaaatatgtatttagtgagtggtgagtggaaggcggaacaggagctatttttaccttatttgaaggaggctgttttagtcccgatgtttgattattttactgcgaatccttatcccggagtggaaattcctggttggtataaagaatggaaagcagaaaaggattgaatttagatattgaaaatcatgaaaaaaattgtttatatacttattgttttgagcttgagtttgagcggatgtttgaatgatgaaacgaccgcagctcatattgaaatttctgatttgtcatcagaaatgacggatacgattctttatgcaacaacgacaaaacctgtgatattggatgctacagaatttataacgcagacggattcgaattgtcctttggattatgtttggagtgtaggaaaaatccaaagttggaatgattatgataaatttcatgaggtggattctatggtcgtaatatcccgtgaagctaaattgaatcatatttttacaacaatagataaacggttacttcttcgtttgcaagtaactaatcagtatacggctcatattcagtattgggtggtgaatgtaacttctggatttgatcagggtatagtgttgtttagtaaaaatgaggagggcaagggaatgttctccattttgaattcacctaaaggtattgatactcttttggtgatgaagtcggatgattttttgtatgttacgggtgaaaatgatccgaaattggatgaggatattgtagattttgttttttattcaggtaataagaagtatccggattataatgcacaaatagcacatattctgtctaaaaagaataaagaggcttatgctcttgatcagtactcttttcagacgatacctcagggcgtttttaggttttctaaaactcctttatgtctgacgatgcattggcatactggaaatacgcgtgaactatatgatttatttgcctttacggaagatggagatgttttgtcttattgtaaaaagtttaaaggagaatattctccaatggcttttgatactgtgaaacattgggatagatgtggctttggtcagagtcggatgagtgaaaattctaaacagtgtggagatattctttggttgtataatgattctacatcaactatttatgggatgtgggcacatgacatgcaaaaatcaactgacgaatctcagcgtttaaatgattatattggtccaaaatcatttccaggagaagaaattattaatgcagcatatggtttggggtatcgtttcggtatgggtgctccgaccacgaatgatgtttttgtttatacacggagcaaagaaaatccgagacagatctatatgcatacgtggttttcagtagggtggggaagtaattttattaatgctgttcaatatgctaattatgtgagacctgaattggaagagggggaagaaattgcgcttcaaaaggattcgcgtatattaatgttgccggagcgtaatgcaaaatattttcataatggtaaaaaggtattttgtatgacaggaatcgcttatcctccattgtcttctaaacctcatagtcgggaggtgtttgatgctgctgttgcaacagggcagcccaatgcggaagttacagatattaatttctatgttgctaaaaattcaaataaacagtatgttttgattgctctatataatccagattcagatgtcgataaaaaaggaagtgtttatgtggtagctgcggatgatttgtcgaatattgtggctaaatacgaaaatgttgcttataaaccattgcgtattttttataaatatcatgagctgtagtggctttatgccggaatgtttttattgatggactgtggagtgtcttttatgaaagtacgctccacagttttgtttttttattcgaaatatagtatctttgaataacttaaatattagcaatatgaaatcgaattggatacgttttgattgggcaatgaaacgtcttttgcgtcagaagagtaattttgttgttttagagggttttttgactagtttacttgagaagccggttaaaataatagagattttggaaagtgaaggtaataagcgtgatgctgaggataaatttaatcgagtggatgttttagccgaggattctaatttggaaaaatttgtgatagagatacagaatgagagggaattggattattttcataggatgttgtatggaacttcgcggattattttagattttttacatgaaggagatgcttattcagatatacggaaagtatattcggtgaatattgtttattttgatttggggcagggaaaagattatgtttatcatgggaaaacagagtttcgaggaattcatgaggatgatattttagcattgtctcgtattcagcgcaagcgttttagtttgggaatggcttcggatgtatttcctgaatactatatattgagagtaaatgattttgataatttggctaagacacctttagatgaatggatgcaatttttgaagacgggtgttatagaccctggaatgtcggcgcctgggttggcagaagcacgtgagcgtttgcgacgagaatgtctttctcctgaagaacaacaggagtatgacgatgaggtagaacgtttgcgatatcagcgtagcgtgcttgaaactagtcgtatagaaggtagagaggaaggtcgtgctgaaggtttggctgaaggtcgtgcagaagggcaacgtatagcacagctccatatcgcccatagtttattacaagcaggtatggatttggaagaggtggtgaaagtgacaggagtgaatcggaaagatttgtaacaatcgtttgtgaatgaaaatacagaggtttatggggaaaatattttgcagcgatgttttttctttctaattttactaactgaaaagcggtattgctgtatggaaagaatatattaatcattaataaagagtatatgcaaacaattgacacttacaattttcaagggaagagagctttgattcgcgttgatttcaatgtgccattgaatgacaaatttgagataacagatgatacccgtatgcgggctgccgttccgacgattaagaaggtgcttgccggaggtggttctgtgattttgatgtctcatcttggacgtcccaaaaaagtagatgcaaaatattcattgaaacatattttgaaacatttggaagagttgttgggaacaccggtgaaatttgcagatgattgtattggcgagagtgcgaaaacacaggctgcagagctgagaccgggagaggtgttgttgttagagaacttacgtttctatgctgaggaagaagggaagcctcgtggtttggctgaggacgcttctgatgaggagaaaaaaacggcaaaagcagcagttaaggagtctcaaaagaaatttgttgcagatcttgcatcattggcagatgtttggattaatgatgcatttggcacagcccaccgtgcacacgcatccacagcgttgattgcatcttatttcccgaatgataagatgttcggttatgtaatggaaggagaattgaaggctgttgataatgtgatgcaacatccgcaacgtccgtttacagcaattatgggaggttctaaagtgtcttctaagattgatattatcatgaatttgatggataaggttgataatttgattttgggaggcggaatgacatatacattcaaagcagctttaggcggtcatgtcggagcttcaatttgtgaaacagataaatttgatttggcattggatattatccgtatcgctaaagagaaaggtgtgaatttggtattgtcagatcaggctgtgatcggtgatagcttcagtaatgatgccaatgtacagatttgtgatccgatgaatattcctgatggctgggagggtctggatgtcggtcctgagactcgcgagcgttttgcaaaagtaattgaagaatcgaaaactattttgtggaatggtccggtaggagtttttgaaatgccgaaatttgccgaaggaactaaggctgttgctgatgctattgttcgggcaacagaacatggagctttttcattgattggaggcggtgactccgtggctgcaattaatcaattcggtttggcggataaagtaagttacgtatctaccggaggcggtgcattgttggaatacatcgaagggaaagagttgcctggaattacggctattcgcggataagctggaatattaagataaatgcaagcgcagcaagatacattttttgctgcgcttgttttttatttttgtcttttttacctttgtggaataagtttaaaatgtcattcttatgagtaatataattccagtgatagagccgacaatggttctgaatgaagaaatctgcaagagcaatattgcccgtatggcgcagaaggcaaaggctgccggtgtgacttttcggcctcattttaaaacacaccagtcacgtgaaatcggagaatggtttcgggcaagtggtgtggagaagattacggtatcgtcattgaatatggctatgaaatttgcagaatggggatggaatgatattactgtagcattcccggtgaattgtttggagcatgaaaaaataaatgctttggcatctaaaataagattgaatctattgttggtgcattctgaaggagcacggcaattgtcagaatgtttgaaatatcccgtgggcgtttatttaggagtggataccggctaccatagagatggagttgatgctaacaattatgaaaagattgaccgtataattaatattgtagctccggatgtaaatataaaattcgaaggttttctgactcatgccggtcatacttatcatgctcgttctaaggaagaaatcatgcaaattcacaaagacaatctccggatgctgaaaaatataaaggagaggtatatagaccgttatccacaattgaaaatttcgattggagatacgccatcttgttcgttggctgaccggtttggtgtcgctgatgaaatccgtccgggtaattttgtcttttatgatgtaacccagatgcagataggttcatgtgattggtataatatagcgatggctgtaaaatgtccggtagtggatattaatttggatagaaacgaagcagtgatttatggaggtggagttcatttctcgaaggagtatatcagtcgtgaaggtgatcgccctctatatggattagttgtggaaaatcatagtgattattggggggatgttgtgccgggagtggaagtcgtctctctttctcaagagcatggagttgtgcgttgtacggatgaatttttggcaaatctgcatgtcggtgacattataaccgtattgccggtccattcgtgtatgacagccgatctgatgaaggtttatcacatgaatgatggtcgcacagcgatgcatatataaaaatatggatgaatgccgtaaagccgcggaacgtatagccgcccacacaatcccgctaagtgaggaaagtgtggtgcagcttaccggaatactagtccgccgagagttgtctaaaggtgatttttttttgcaagagggagaaattgcccgttcaatggggatggttatggagggtatggtgcgtcagttttattggaagaaaaaacgagaagtgacagaacatatcacctatgaagaccatctttttgtctgcttggagagttttatccgtcagatgcccggagctttttatgttgaagctttggaacctagtgtgatttacgaagtgccctatgatggtttacattatttgatggataaaaatcctgaaattctgagattgtattgtgctattctggaaagttcgttattgatttctcaaaagaaggcaaatgcccggtgtcggcagtctgtgggggagcgttatcgtcagttggaacgagaacatcctgaaattatacgtagagcaccccagatatatgttgcatctttattaggaatgacacctgaaacattaagtcgtatacgtgccggtaaattataggtggcttgatatatatcaagaaataaagctgtagggagtgattcttacttaaaatcattgtcgttgattgggaattgttgaaatttgtaacggattaaaaatattttaccgtaatgagcagatttctatttttattttgtttgcttgctccgatttggggagtgagggctgatgaattgcctaaattgggcaagtcgcctcttgatgaggtaatcaaagcaatgaccactgatgaaaaaattcgtttgttgacaggagccggagaggtgacggaggatttaagggcagctgtcggttatacagataagattgtacccggagccgcaggaacgacctatcctgtggagcgtttgggaattccggcgatggtactcgctgacggtccttccggtctacgaattgatcaggagcgtgaaggtagcaagcggacttattattgtacagctttcccggtgccgaccgttttggcttctacttggaataccggattggtgaatctcgtgggtaaggcaatgggaaatgaagtgttggaatataattgtgatatattattggctccggcattgaatattcatcgtaatccgctttgcgggcgtaattatgaatattactccgaagacccttatttgactggttgtatggcgacggcaatggttcaaggtattcagtccaatggagtgggaacttctatcaagcattttgccgtaaataatcaagagactaaccgtatcgccaatgatgctattgtatctccccgtgctttgcgggaaatatatctgaagggattcgagatggtggtaaaagaagccaagccttggactgtaatgtcttcttataacaaaataaacggtgaatacacttctgagagctatgatttgttgacgacaatattgcgtgatgaatggggttataaaggtattgttgtaacagattggttcggtggtagggatgctgtggcacaagtggttgccggtaatgatttaatcatgccgggtaaagtacgccagcaggacagtatccgccaggcattgaaggacgggcgtcttgccatggcagatgtggatagaaatgtgcggcgtattttggagttgatattgcagacgcctcgtttcaaaggatatgtcttttctgataatccagacttaaaggcgcatgctgttattactcgggatgtggctactgaaggtatggtgcttttaaagaatgaacagcagactttgcctctaagtgatgatattaagacaattgcagtgtttggtaatacatcctatcgtgctgttgcgggaggtactggtagtggagatgtggcagaggcttataccgtatctttagaggaaggacttcagcatgccggttataaaatggatgccggaatcaagaaaatgtatgaagaatatatcgatgcggaagaggcaaaaattgataaaaagaaatatatgcatgttacacctccccgtatattggaatacaatctgccggatgaagtattgcgtaagaaagcagaggaggcagatatcgcaatggtcacaatcggtaggaatgcgggcgaatatacagaccgtcgtgtagaagatgattttaatttatgtgatgatgagatgcagatgttgaaaaaagtgacagagttgtttcatcaggcaggcaagagtgtagtggtgatattgaatatcggcggtgttgttgaaactgcttcttggcgcgatttgccggatgctatcttggtagcatggcaaggcggtcaggaaagcggtaattcattggctgatatactgtcaggaaaagtcagtccttcaggtaaactgccaatgacatttcctatccgttatgaagatgctgcatcttcaaaaaactttccggtgatagaagcggaggaggcagtaaatatttatcgggaatttttcacgggagccaaaggcgtggatcgtcccaatgtagactatacgctttatgaagagggaatttttgtgggctaccgttattttgattcctttgatgtcgcaacagcttatccctttggatacggactgtcctatactgattttaaatatagtaaacccatttgtgtcaagacagatgtcggctatgagttttcatgcactgtcaccaatagcggaaaggttcccggtaaagaagttgtgcaactgtatgttgcagctccgggacttgatatggtaaaaccggaaaaggaattgcgggcatttgctaaaacgcgtttgttggctccgggagagagcgaaacggtgaagatggtggttaaaaagtctgatttgtcatcttttgacgagtcatcctcttgttggcaagtagaaaccggcaaataccgggcattgtggggaacttcttctacagatatccgtttgcagaaaaagtttgatgtgaaagatgagattaaaggtccagaaatgcatcgggtactcctgcctaagagggaattgaatgaattgaaaaaataaagaataaggctttatatgaagtttcggtgctgtttttatacggcaccgaatttttttatcctttgctgttagggccttttcaagggttggttataaatcaaatttatataaaaaggaaggagagggttcggttggtattgatgtcgatggctttggctctgatatattttatggtgaggatataatttgtatttttgtcatcgttattgtaaaatatgaactatggcaaacttttttaagtcccttttctttggtgagggagaagaaactgcagaagtaaaggcacagaaaaattttgatgtgctgaaatatgatggaatcaaggctttgaaggtggggaagatagcttatgctatccggtgttttaatgaggcgttgaagattcagaaagatgtggaggtgatggagcatctggtgacggcttattcgcgggaggataagacggaggaggctgtggagatggccggtcgtttgctggaagaagaaccggataatgtggcggtgatgttgttgcgggcaaatcttaactatatgattgaacgttatgctgacgtgattgcagattgcgaacgggcggcagagttggataataccgaagtgagagcttattatttggcaggacgtgccaagaagatggccggagataatatcggggcgattgtcagtctgtcgcaggcaatagctggtaaggaagattatgcggctgcctggttgttgcgggccgaagtgatgttggctacgggtggctatacggacggattgcaggatgcagagaaggctgtggagttggtgccggaggaggaacaggcctatctggtgagaggacaactccgtgaagcattgaaacaatgcgaagaggcggagcaggattaccgttatgtgatagagttgaatcctttcaatgaacaggcatatctgcaattgggaagtctttttattgcgcgtgagcagccggatgaggcaattgagctgtttgatgaggcgattgaattgaaacctgattttgccaaggcttatagcgaacgtggacgtgcgcgtttgatgaaaggggataagaatggttcgttcgaagatttgaaaaaagcgatggaactgaatccggagggggaggaggctaaaaaaatcaacggcacttattctaattttgaggacatgtataaaaacagaccgttatgatggaagagagaatagaaagggctgtggagctgttccgtgccggatataattgttcgcagtcggtatgtgcggcatttgcagatatgtatggctatacggaggaacaggcattgcggatgtctgcttcatttggtggaggaatcggacggatgcgtatgacatgtggagcggcttgtggtatgtttgtcttggcaggtttggaaaccggctgtgtggagggtgcggacagggcaggtaaggaagcgaattatcgggtggtgcagcagttggctgatgagtttgtgaagaggaatggttcgttgatctgtgcagagttgttgggattggacaagaaaaaacatgataatccggtgccggaagaacgaacggaggcctattataagaaacgtccgtgtgtcaaaacagttgaagaggctgctcgtatttgggttgagtttctggaacaacagaaaaataaatcggtggaagatagtgaggcttctgaattgtaataattttattttaggaaaattttttgtcattatatcgttgatgataaatgatgttgtttttgagttagtatatagatattcaataaattgatgaatattgccgaataagatggttggagtaaaatggaaaactttgattatcttttcggcaattttgttttctataagtttcaattttaacttttttgttttctgaaaagtttctatttttgccgtggattcgtgaatgaatatgagtctgtcatttggtgtctgttcgttggaaacggacttaaaagggaatcaggtgtgaatcctgaacagtcccgctgctgtaaactcggaatgaatggctaaacatcaagaaatgccactgtcgataatggatgggaaggtggtttggtcagggagtgagtcagaagacctgccagatgacaatgtttcgatggctttcgaggaaagagccgggacatgaatgaaggattgtttgtcatttatttttccctcctcattttgtcagctgtcgtaattagcttggaaattatttaatataaaagaatacacaggatatgatacagactgtattgaaaagagatggcaggatagtggggtttaatgaagaaaaaataattgctgcggtgcgacgggccatgttgcatacggacaaaggtgaagatatggaattggcgagggatattgccgaccgtattgcgtgtcggggccaagagcagatgagtgtggaggaaatccaggattgtgtggagatggaattgatgaagagccggcgtaaggatgtggcacaagtatatattgcttatcgaaatcaacgcagtgtagcccgtaaagccaaaactcgtgatatttttctggaaatcatagagacgaagtcgaatgatgtgactcgagaaaatgcgaatatgaatgcggatactccggctgggatgatgatgaagtttgccagcgagacaacaaaaccgtttgtagatgactatttgttgacagctgaggtgaaggaagcagtcagacagggatatattcatattcacgataaggattattacccgacaaagagtctaacttgtgtgcagcatcctttggataagattttaaaatacggtttttttgccgggcatggagagtcaagaccggcaaaacggatagaaacagcaagtatattggggtgtatttctttggaaacagcacaaaatgaaatgcatggaggacaggcgataccggccttcgatttttatctggcgccttatgtcagaagtagttttgtggaagaggtgaaagtattggaggatatgcttggaaagaatttcaaacatttatatgattatccggtgaaagattatgtgaaacgtgatttggatggattggacggcgatgagcgggttttgcagcatgcggtgaacagaactgtggggcgcgtgcatcaggctatggaggcttttatacataatatgaatacaatccatagtcgtggcggtaatcaggtggtgtttagttctgtgaattacggtacggatatttctgcggaaggacggtgtattattcgtgagatgttgttgtctacctatcggggggtggggaatggtgtaacagcgattttcccgatacagatttggaagaaaaaaaggggagtgaattatctgccggatgacccgaattatgatttgtatgaattggcctgtaaggtatccgctcgtcggttttttcctaatttcattaatttggatgctacttttaaccgtcatgaattgtggaaagcggacgatccgcaacgttatcgttatgaaaccgctacaatgggatgccggacgcgcgtgtttgaaaatcgtaatggagagaagacttctatcgggcgtggtaatttgtcattttcaacggtgaatattgtgcggatagcaatcgagtgtatgagtatagcggataaggaagagcgtatcggtgcattttttaaaaagctggattctgtattggatttgacagcattgcaattgcatagacgtttggaatttcagaaaacagctaaggcgaagcagtttcctttgctgatgtcggcattatggaatggctcggaaaatcttaaaccggaggatacgattgagagtgtaattgagcaagggactttgggtattggatttatcggtctggcagagtgtttggtggcattgacgggcaaacatcatggcgaagatgcggatgcgcaacagttgggattgcgtattgtcacatatatgcgtgataaggctaatagttatgctgctcagtatgggcataattacagtgttttggcgactcctgcagagggtttgagcggtaagtttaccattaaagacagaaaaagttttggtgtgattccaggagttacggatcgagaatattatacaaattctaaccatgtgccggtgtattataaatgcagtgcacggcataaggcagaagtagaggctccttatcatgacctgacgcgtggtgggcatattttttatgtagaaatcgatggagatgcgacgaagaatccgtttgccattatgtcagttgtggatatgatggattattataatatgggatattgttctgtgaatcataatcgcaaccgctgcatggattgcggacatgaggatgctgtggatggtgaagaggtatgtccggtttgtggaagttggaacatggattgtctgcagcgaattaccggatatttggtgggaacgacagatcgttggaatcgtgcaaagctggctgagttgcatgatcgggtgcgccatagttaaaattttggcatgatggatttggttttaatggatattgtagaagatacagtggtggatggtccgggattccggacggccatttacgcagccgggtgtcgtcatcattgtgagggttgccacaatccgcagtcatggaatccggcaaacggatatcgagtggaagtggagcaggtggcaaaacagttgttgtcagatccttttttgaacgttactttcagcggtggtgatcccttggaacaggtggaggcatttaccgagctggcaaggttaatcaagtctcagagcaaaaaaacaatttggtgttataccggttatcgctttgaggatatttgtcggtcgcggcgcatgttgcagatattgccttatattgatgttttggttgatggacggtatgtgcaaaaattacgggatacagagttgctgtttcgtggaagtagtaatcaacggttggtggatgtggaagcttcgttgcagttaggaaaaactgtattagtggattatgagccattgcctatagtggcgatttaggagtttttgtataaatatgcttgtgtttgtatgaatatgcaaacctattgtggggttttgcattgttgttcagtgtattgcgtattttattaaaataatttatgattcgaaaatgccgaaaagtatttgtaattttgtgaccgttaaatagtattcataaacctaaatctgtatctatatgggatttgttacaaaagaaaagtttttgtcgaaagatttttttattacctatggttggcttttgggcggatgttttgtatttgctttaggagctgtaatgtttgctgagccgtacggtttcgctccgggaggaacttatggcttgtctatggtattccaccatttgtggggatgggaaactgaagtcgcagctttgtgtatggatgttcctcttttattgttgggaatctatttcttaggtggtatgtttggtgtaaagaccgttatctgtacatttgctattccgggatttatgcgtttgattcactatgtatatggatatgatgcattgttggagccgggtattgttgaccgtacaatgttaaacgagcagttgttgtcagcaattttcggtggtatcgtttatggtgttggtatcggtatgattttcaaagctcgtgctacctcaggaggttcggatatcatctcaatgattttgaataaatatactcatatttctttgggaactttggtaatcattgttgactgtacgattactttgagtacggtagttgcctttggtgactggcgtttgcctatgtattcatggattattgtatttattgaaggtaaagtgattgaccttgttttggatggtgctgctgttcataagactttgatgattgtatctgataaagtggatccgattaagaatgttattatcaacgaaattaatcgtggtgcaactttgttgcctgctgtgggaatgtataaaggacagagccgtaatatgatttatactattcttactcggcgtgaaatgatggttttacgtcatagaatagcagagattgatccggaagcttttatcaatgtgattgattcaaaagagattttaggtcgtggattcaagcctttgaaagaggaataaaatcagactggaatataaaaatagccgggagttttcacttccggctatttttatgtcattgtttgttttaatacatatctgtaatatcccatacaaaagctcggataccgttttctttatttacttcatcaagtttcttgacatatttcaagataaggggaaccatctcttcgtctacaattgtgatggttgctgagttcatttccggccatgtatgtgagcccatgcggggttcgccgtctgttgtgccggcaccattaactaatggccattgggtaaagcctcgtacctgcagttggtcaagcatgtaggctacacgttctgtcaatgcttggttgtatgtgataaatactgcttttttcatagttgagttgaatttattgagagattaaaagtctggaatcagacttttaatcggtctttatttagttctcttttttcttaggaagatctttttctgcattgaagtcgctcatgaacttaaattgcttggcaagattcttctttttgtcgcggcttccgcttctgtccattgctgcatatacagcaggtacaataatcatagtaatgatggttgagaagaccataccaccgataacggcgatacccattgggcgccaggtttcagaaccatctccggtactcattgccataggtaccataccaagtattgtggttaatgaagtcattaataccggacgcagacgtgaacgacaagctccggcaatggcatcgtacaggcgtatgccgcgttcgcgcattaagttgataaagtcaatcaatacaataccgttcttagttacaataccgaccaacatgacacctcccaatgctgctacgatactcaaggtcgtattagtcatcaataaggccagtacaacaccagtgaaggcgaatgggattgacaacatgatgatgaaaggcatcttgaatgattcgaactgtgcagccattacgatgtataccaacatcaatgataaaagtaataaagctatcaaagaactgaaggattcttgttggtcttcatagttaccaccaacatataatgttataccttgtggaatttcatccagattgtctatgattttttgggcttctgttgcaatgtctcccaatgcatatcctgctgcaggagtaacagatacctttaacagacgctgtttacttttacgttcaatgtttggtggagagaagaattctttaatcttgccaagctctttcaaacgaactttttgacctttaccatctgtgataatgatgttttcaacttcagtcagagaagaacggtatttttcatccaaacggacgatgatatcatattcttcaccatcttctttgaatttgctgttacggaatccgtatatacggtttcgcatgatttgtccgacctgagatgttgtcaatccatgttgtgccaacttgtcttgatctaggatgatttgtagttcggatttatcatcgtcacgactgattttaatatcttctgctccaggaatctgacgcatttgaattgctaattcttgtgccagacggttggttgcattaaagtcgtgacccattatttcaacatcgacactgttgctacccattgaacctccagtactggtggtgactgtatattgtaggatatccgggaagcgttttaagattccacgaatttggtctgctataacaaatacacttctgtcacgatctgcacggtctatggtacgtagacgcatgttcaatatgttgtttccggtactgttcatcatagatgcaaatgatgcttcttcttcactaccatatgacaagttgatcaaacgaatttctggaacttctgcacgaatgatagagtctatttgtaaagcgattcctttggttacttctacgcgttgtccggattgcatctttacataaacgttcaagttattctggtcattttggggcatgaagtctgttttgatgtaacggcttaatccgcaagatcccaagaataagaagaacatagagctgattaccactgttttatggcaaagaacccaacgaatcaatttttcgtattctacatccaaacggtcgaggcatttggtggtgaaatagtagaaactgaatttatttgaagagcttttttcttgaatcttgagtaattgagaacaaagcatcggggtcaaagagatggctgttgcagttgatgtacaaactgttatacagacaatccaaccgagttgtttgaataagattcctgtcattccgcttaccaatgtcaaggggaagaatacggctacagttactaatgttgttacaattaccgacaaccatacttcgtttgtaccatattttgcagcttctcgaggacggctaccacgatcaacgtgtttggtgatgttttccagtaccacgatggcatcgtctacaaccatacctacggcaattgacaatgatgatagagaaatcatattcaaggattcacctgtcgcaaataggtagatgaaggctacaatcaatgaaattggaatagtcaaggcaataataaatgtagcgcgccaacgtccgaggaataggaatacaaccaatacaacgaaaatcaatgcatacatcaaagattcttgcaggttgttgattgagttgatgataaattctgagttatcagagatgatttcgaatttaatatcagtaggcaattctctcattgccaattctaactgctctttagcttcttttgcaacagcaacagcatttgcatcagtttgttttgtgatcaacaatacaccgccatccccgcgattgattaattgctctaaggtgatatccttgattgtatcacgtacagttgctacatcatgtagatagatggttctgttgttttgagttcccaatacgatatttttaatttggtcgctctcttcaaattccccttctacacggagagtgtagtccatctctcccattttgacattaccggaagatacgtccttgttttctgcgagaatcttgttgccaatttgctccaaggtgagattgtaggcatccaattggtttggattcaaatcgacatatacaacacgctcgggtgctccggctaaggttacagaagcgactccgtctacttgattcaaacgggtgataactttgtcatcaatgattttgtcaatgccgggataggattcctttgcggtaacagcataaatcaagataggcatcattgaagtgttgaaacgcatgattgttggacggtcaatatcatcgggcaagttttgcattgctttgtcaacagcgtctcgtacgtcgttagaggcttcgtcaagattggcttcccattcgaattccaatgatataacagccaagttatcataagatgtagaacttaactctttcaaatcatctacagagtttagttgatcttccagaattttggtgacattttcttcaatatccgaagcattggctcccggatatgttgccattacagtcaagtagggtgggtccatctttggatattggtccaccggcaactgaatgtaggaggcaatacccaataccaaaatggcaatgaagaccattaaggtagatatgggtttgtttaccgctgaattatatatactcatatttaaaaaattagccgattaattgatttattttgtgattgaaagcggtgaaccgtcaataaggcgaccttgaccgacaactactaattgatctccttcgtggatttcgtcgctaattaattcaatcttttcgtcgaaacgttgtcctaattctacagcaacacgttttgcaacaccatttttgttcaagaatacatagcggtcatttgctccttgaagttttagaacggcaatagcaggagccactacgatctctgtgttaccaaccaagaaattgatagttccatacattcccgggcgtaaagcttcgtctttattcggaatctgaacttctacagtaaatgttctggatgagggatcaatggtcggataaacgatgctaattgttccttcaaatgtgcgttccggatacaattcatttttcagttgtaccttcatgcctttttttaccaaaaggaagtactgttctgacaaatttacgttggcttttaaagtactgattttttcaatggcgataatggatggtttattggctccaccaaaagcacctccggtgtaaacttctccgttttcaaagtatttaccggtaacgacaccatcaaaaggtgctaacattcgtgtgttctcttttaagaactctacatttgctttttgcacttcgtattgggttactgctgcatcgtatgcctgtttgctgatgctttgggttttattcaacaataaggcacggttgtattctgcttccagattctttaattgaacttctgcttgtactaattgggtacgatccatttctacaagtaattgacctttttttatgcggtctccaacttctacatagattttggaaatacgtccggctgcggctggagcataatacacttgttcgtcggcctgaagattggctgcatagtccaatgttcgggaaatttcttgtttttccagagtctgtactttaaccggaatggcttcaacagcagcagcctttccgtcatctttcttgctagagcatccggcgaggattgcaattgtgagtgcagataaaataacgttctttatcattgttctgattatttatgttgtttctattatttcaagttgttgtataatttctctagttgggtctgtgcctgtagcaatgtcagacaagcattggtaaagttgctttctgcagtcagatatgtattgtttgcttgtgttaaatccaaacttgatactgcaccagcattgtatttgtgttggtagttttccaatactttacgggcaacttcaatattttctttctgaagattgtagtcttccaatgcatttttcagtgcgaatttgtattgctcttcctgtaaattcagttgatcttccagcaggcttttgttgagcttggtttgttccaacgtgattttttgttggtctaattgagctttacgctgtaaaccagaaaaaaccggaatgctcattgtgatggatgctgaatgaggcatgttcataaaacctcctgatttaatctggtgctggtaagaatatgagccgctgattgttggagcataggcccattttttcaagcctaccatcttcttttgtagttcttcttgtgtcaacatcagtgcgaactgactatttttgttgatgtcaaattgttgattggctaaagataggaagttgcctagttccaagaatttctcaattggatctgttagggagatgggagtccctgctggtagacccaactggaggcgaagtaggttatagtttacatctaccgtgcgttgcatagctagatagctgttttttaattgtcctacagttacacgtatttgatctacatcagttatctctgcagttcctgctttatacatgttttctgtatgcatctggattttactcatgttgtctaagttaccctttacgatttccattagacgttcgctagccaagatggtgtagtaggaattgtaaacagtttctttgatatccagttctgtaatgtcaacctgttgtgctgcaattcgttttgcaattttactggtttgaatccctagaatccattgtccgctgaataacaattgagatacagatactccgacgtttacttggtcaaccattttgaagccagagccaccaaagtcaaccttgtgtccaaagtttgtgctatatcccaacgaaccgtttacttggggaagtccttgagaaatagcctctgtaaccattttgtttctcatctcaatgtttaattgcgaagattgcaattccttgttgtgctctactgcatgtttgattgcttgttcgagtgaaaggctttgcggctcgttcgactggctttgtgcctgtagcagccatggaacgagaatcgcgataaaagtgattaatactccttttttcattctctgtagatttattatgtttgaataattttgcactttaaccaatcgcgcacgttgcaaataatgtgccatgctcgattttatgttattttttgtaatttcttttaagttaattcttctaatatttcctgtccttgaggagttacaaaactgcgtaatgtgttttccacaatggttgatacaatggttgctatcgggtatttgatttcactgattaattccggttcgcttagaatcagcatttgtttaacaaataaatacacttgaacttcttgattgatactgcttctaaagttgccttcttggatgcctttgtttataatttcattgaacagtgcttgtatagcctcctggtctattttatttgcttttttatatacttccgggtggtatttttttaaatcgaatagatttgcaggaagtcgactattgaaattttcaataatgtgatctctgatattcaacatcatatggatagcatctaattgccttaatttttttaattgttgttgagtgtgataattgttacgacgataaaccatgacctgctcaacgatgtcatctttgttggaaaataattgataaagcgtttttttagagatttttaaatgagtacagatgtcttccatggatgtactgcgtaatccatatttaaggaaaagatctgaaatgttttccaataatttctcttttaattgtttgctttcgtttgctgtcatgtgtgtaatatttgtttatggaaacgttttatatacaaaacgtttccatgtgctgttattctgcaaataatatgccattggtctatgtgttagagactattttctgaaatatcccaatttcgttttacttttgctactaattcatttttcctttctacctttgtcgtctatgattgatccatctactatacagaaaatttttgatgctgcagatatctatgaagtagtgtccgattttgtcagtttgaaaaaacgtggggtaaactatgttggctgctgtccttttcataatgagaaaaccggttcgtttacggtatctcctgccaagggaatatataaatgtttcggatgtgggaaggggggtaatgccgtgaattttatcatggagcatgaacaactttcttatgtggaagctctgcgatggttggcagctaaatacaatatcattatagaggaaaaagagctgactgaaagtgaaaagcaggagcggacagaacgggagagtatgttgatagtaaccagttatgccgaaaagttctttacttatcagttgtggcatacggatgaaggtaagtctgtaggaatgagttatttccgtcgtagaggcctggatgataaaaccatagagaaatttggcttggggtacagtccggaggcttgggatgcttttactaaaaatgctttggataaaggatataaaaaggattttctggtgaaaacaggtcttacaatagattctgaaaaaggtctgtttgaccgttttcgggctagagtaatgtttccaatccgtgacttagccggaaaaattattgcttttggtggtcgtattatgaccaacgataaaaaaagtgccaagtatcttaattctcctgaatcagaaatataccataagagccgcactttatatggtatctattttgcaaaaaaaagtattgtccaaaatgatcgttgttttttagtagagggttatttggatgtaatttcctttcatcaaaaaggaatagaaaatacagttgcatcttccggaacttcattgactgttgaacaaattcgcttaatgcgtcgtttgacctctaatgtgacaatcatttatgatggtgatgccgctggcattaaagcatctttacgtggtattgaccttgtcttggaggaaggattgaatgtaaggattgtttccctgccggatggtgaagatcctgattcgtttgcgcaagcacatacggcagaggaggtattggaatatatcaatgctcacgaaaccgatttcattaatttcaagacacagttacttttagaacaggcaggaggagaccctattgaacgtgcaaaattgattacagatattgttcgtagtatctctttaattccagatacaattacgcgttctgtatatgtacgggagacggcgggtcaaatgcaagtggaagagtctgtcctttataatgagataagccgtttaagacgacaaaagtccggagacaatgttccggtgccgtataaagctactgtccagcaacctaaagtgactttaactccaatgaaattagggggcgtttctccttgtgatacagaggagattgttctcgttcgctatatgttgcaatttggtacagatgtattgtatgaggaagaacatgaagatggtcggtatgttatcacagtgggagaatatataattaatgagcttgctgaagatgaattattgttgttgaatcctcaattgcagaaaatccaacaagagtatcgtaagtgttacaagactatgtccgatttttctcctgccaggtattttacagctcatccagatccggagatatcgtctgttgttgcagacattttgagtgaaccttatgaactcagtaagatgtgggtattgttggatacgactctgcgttcagaggagagtatgttgactgagttgctgcccaaagtagtggataattataaaatgaagcgtatagagatattgtgtaaagaagctgataataagattttagaatgtcagaatgcagggaatatggatgaattgatagaatgggtaaagaagaagaatgctatcatcaaggtgcgggcacggttaaatgaaaaattaaaaaggacgatttaatcgtcctttttaatttgagattatatgaatttttcacgattctgcattttgtatagacctataagtaaaaacacaaaacttgcggataatataaataatctgttgtaaaatacggtgttgtagaatatttctggattcttgtccaatggaacatcaaatggattcagaaaaacattccatttgctgactcctaacatgctattgagtgcaaataataacatgccaatgacgataattaatacggctgtaccattcccattgcgtacaattgtgctgagcataaaacaaagtagtccgataaataaggcaggtacaattgtttgcagtgttaggttgactgcaggtacttctacgacaagccaattagtgatgattgacagaagcaaggttagtataaagcagatagcataagctattatcaaccggaataaccatactttgtatcggtagttgggaataccgaatataatttcaataattttggcatcttggtcattttgtattccgaagcatgtagggtaaaaaatgagcaaaatagatgggactaatagcatgttgtatccggttgccatcgttatttcatcatccgaaaacaaactgatgccgacagtgatgatataaaaaccgatagcactgagtatgaagtatatgaatttatttccgaatataattttgatattatattggatgagtttgataatgggcgttgcaattttgaatttcatattgactatcacttttcgtagtttgttatttattgtgtaataatctgttcatggtttgccaattttacgcttcttagcagccatagataggaatcttcaagcaatggtgttgtttttacagcattgggtactggttgcgtttcagataaacagcgtactttgatgttttcgccatttctgatgtggtgtaccaatagtaaatctgaaggtaattttgcaaagtcgcgtgccggtatttcaaaagtccaggtaacatctttggcaatttctaccatatcggtcggtgtgccatgatattttaaagaacctttattgattactccgacttgattacaagaactggcgatatcttcaatgatgtgtgttgagaatatcacgatgcgattacgggataattccactaataaatttcggaaacggatacgctcacgagggtctagaccagctgtcggttcgtcaacgaccaatatgcgtggcaagtttagcagagtctgtgcgataccaattcgttgtttcataccgcctgaaaatccaccgatttttttatctttgttttcatacatgtgtactgcttccaacacttccgtgatgcgctgtttgcgcactttggggttgtatataccttttaagagtgcttgatattcaacaaattcccatgatgtgagattttcatatgtaccaaactcctgaggaagatagccgataagaccttgtaattcttctcgttttttctgtgtatcaatgccattgatgaatattttaccatagctttgttcaaagattccgcagataatacgcatcaaggttgttttcccggctccgtttggccccaataaaccgaacattcctgtgtgtatatccatagatacggcatttaaagccttgaagggttttttcttatagccaatgactgggattttggtggctacttgatagattatttttttgatttcgcggaatcgcccgtctatttgatcaattttaatgttgtatttgtgaattctttcagatagataatgagcggtaatggcaatataccataaagttcctaataggattgcgactcctgaatctgcaaatttaagagtactccaaatcaatgtggctagaggtgagaaataatgtactgtgatatttaaaatctgaaaagatttacttaataacagcttgttgttagatttaaaatattcattggcaatatggatgatttttattgtcagtagccaagtgcaaatagcgaatataatagcccaaaatgtcagtgtctgataccagtaggtgaaatagaaaatgaaactgtttagaggaatcagccagactaacggttgtagatctttcactgtgcggtattcttcttttaggcctaatcttttgcgagagtgctgaccggaagtccattctctttgaaactcattgggacgaccgtatatttttaccagatttctgattgatatgtgaatttcttggtctggagggataatacggctgttggcttgtcgtaagcttgtttcaataaaccaggtcgctgccggtattagtataatggctccgattaaataaccaattttccacatgagagtcgcattcagaagatagataccgataatggatgccaatagcagagaaatctgaattagcttcattgataaactttgggttctgagtctatacaaggcatcttccataccggaatatagagtagggattataaccaatgtcaagagggtactcatcgttaagcctcctatgactgtaatggcaaaaggagctcctaagccagatacaaactctccttgtcccattgccaatgggaacatagcgacaatggtcgtaatggctgtaatcaaaatggggcgtacgcgagatattccggcaataatcaaggccctggtttttcggttaccgagacgtcttaattgagatgtgtagtcaataagaataatactgttattcactactataccgattaatataataaccccgatgaatacattcgcattcattaacgaattactggtgaatagtaaagccaataatgagccgattgcagccaatggtatggcgaacatcaacacaataggtgctgtcactgactcaaagacggaggctaatatcatgtagataatagcaaatgctgctaatattagaaaggtgaattcactggtttcatcttcctcatgtacaacttcaacagctatacctgtcggaatatctgtttgttgtatcaaatcatcaacttcgattctggcggcttctaaaatactttttgattcattgacgtcagaattgaaagtgtaattaactgtaatttcttcatcttgatttacgcgtataatacttccttggccgcgtcctaggttaatttggctaaaactacgtaaatcagtgatggagttgttgtcatttactacttccagattgcgtaaatcttctaatgtacgaacgggttcgacgtcttcctcttcttctttttctgccagttctttatctttgatgataatgtcgtattcttcatctccggctttatacttgattgaagtagtgttttgaggggcaaaattatttaattcggtgactacatgtgtaggagtaacatcatatatgcccatcaggtattggtcgaatagaatgcgggcttctggctttcctcgggaatagctcatggaagcgttgctgatattttctaactcttctaattgatattccaatagttctgcaagattggacattttttcaaaatcctgaccttttatgatgattttttcgctttgactgcccatacccattttgcgcaaaaggtcttctcctccgctcattaaagcactacctcctcctccttgaaaattttcactgctctctatggcttcatagcttacatcactgatgcgcaatcccttggtcttgtttatgactaaatcttttaattcattgagtgttttgttgtctatcttctcaaaatcgtcttttaatttgattgtaagacgggcatccgttgcaaacacttgtgaattgtattgctctatttccggaatttcttgcaggcgttcttcatatgagcggacagtttcatccgtacggcttaaagtattaccgtttggaaacgtcatgtagatattgaaggtgtctgcttctatttcttttaatgtattcagtgtcaatgtcagagacagagcaagggtaacaaccaatagtagtaatgctgaaaatacaacagtacttggttttcgcaaacatatttttagtagtgcgatataaatttgtacgggacggctgtgtatggatagagtactgaaattgacttgttcgccttgttttttcatgaattggttgactgccatgggtattaataataaggctactactagtgacaataataatgtcgtgatgatagaaacgccaatgtgttccccgattaattttaatagaaaatcatctgaaaatagaaagggcagaaataccgtgatggttgttaatgttgctgcagcaacagccttggcaacttctttagttccttttacagcagcttcttctcttggcataccgattgcccgtaggcggaaaatgttttccatgacaacaacggagttgtctaataacattcccactgccagagcaataccggtcagggtcagtgtgttgatgctaatgccgaagaagtagaaaaaatagtatgccgaaaatacggaaataggaatagcaaatgcaataaaggttactatcttgaaatttcgtaagaataaataaagaataaagatggctaaaattgcacctgtaatggcaagattgataatgatattgatattttcgctcatggtttctgcaacatccgtatcgacttgaatagaaacaccttttgctgcaagttccgtgtttagctgagcaatttcatctcttactcgtttggataaatcaataatgtttactaggggtgatttggcgatgatgcaggttatcacttcttttccattgactctcgaataactgtcttcttctttaatgccaaaatggatttctgcaatgtctttgagcaataccggtccgtctgccacaacaatgttacccagatcacctgtgcttagatattctgccgtgacgtttacaaaatagcgtttgctgttttcatacacagagccggcaaaagttttctccgacatgttgccgctaattagagtgctgatttgtgatgctgtgatattcagtgctttgcatttttctttgtcaagtaggatttcaatgcttttttgccgtcctcccataacattgacagatgcaatcccatctgtgctttccaatacaggaacaatgtctgcatccgtaatgttacggacatagtcgatgtcttcgtcactaagcacctgtaaggtcataaactggtcgctggccataccgactccggctttgctgacctgtacggaaaactcctcgggcagattcttggcgatggctttgattttttcttccagtttcaggtaggtatatttgatatttgtgtttttggtgaatgaaacggttgtattggcttcttgcgaactgattcgggtattgatttcctccacaccttccattccgcttatgataccttctacaggaatcactgcttgactctttatgtatttggggtctaggtttgtttttgtactgatattaatgtgcagagttggatattccgcatccggatataactccattggcaaatatctgtatgaaaataatcccatcatcgtcaaaccgatgaagagcatggaaattaaaacctttcgcctaatcaatttatccatactgttatttcttttttttatcaaagatgtaatatacacaaggtattactaccaatgtcatgatggtggaagtaaataatcctccgataacggccaatgccataggtgaacgtaatgaagctccttctccaaatccgaagcacataggtaataaggcaagtatggttgttaaacttgtcatgatgatagggcggattcgttgctgtgctgctgcttgaagcgcctctgtcaatgtatagccttcgtcttttagcttgtttgtggcatctaccagcaatatggaattgttcactgcaataccggcaagcatgatgattccgataaatgccatcatgttaagcgaagctcctgctaataaaaaggcataaatacaaccgactcctgccaatggtatggttaacaggattgtgaacggatgacgtaaagattcaaattgtgaagccattaccatgtaaacgaggacgatggataatagtaaggcaaatgaaagcccgttaaatgattctgctcgtttctcttcttctcctgtgattttggctgaatatttcgcagggaattggatattctccaattgagagttgatagcaggggttactccacttaatgtataatctttttcgagcatggcggttaccttgccgatacggctttgatttttacggctgatttctttaggcgcagaggtaatgcttacttctgcgatttctcctaaacggtattttttatcgccttgcactatttctacattttgtagctctgccaatgaaacttccggtactcgtatttcaatatcaatgggttcgccttcagattcaaaagtgctggctgttgtaccgtttaatttgctctttacttgtgaagcgacagatgatatatcaactccgtaaattccgctttttaaacggtcgatagtgatgtctatttcaggtgcacctttttccatggaggtgcgtacatcatagacacctgtaattgatgaaattttttctttcacttcatcacagagttcttctattaattccagctcttcgcctttcacttcgattacaacaggagcttcattatttcctaagatgctctgtagtgcagactgttctttttcaaaggatatttcaataccgtcaggaatgacataattgtgattcagctggttgatgatggcatctgcatctaaacgggaatctcctttgagacgtgctttgatttctgcttgattttcttcttttaagttgccgctacctgcttgattctctgtgttggagggtcctatttgggtaaaaatccattcaagatcttctcctgccaattctgtaatcatggtttctatggtggcggtggcattgtccgtactttgtagacgggatccgggctcaagtgttacaaatgtagaaaactctttggattctgcttttggcataaattccatttttaatagaggaaccaacatatagctgaaaatgactaatataagggctgtgataacaacgatatatcggcgttttaagagcttaccaacaaatctgccgtatccctttatctgtacggattctttgttggcagacgatctatttatgtattttgacgctaacattggcattagcagtatcgctacaaacagggatgatagcaatgagaacgatactgtccaggcttgttctttaaataattctccggctgctccctggatgtatacaatagggagaaatacgacaattgttgttaaggttgatgaggtgatggcacctgcaacttctgatgttccttttatggcagcttctttaggggatagaccgttttccagattgcggtatatgttttccatcacaacgatggcattatctatcaacattcctgctccaagtgccagacctcctaatgtcatgatgttgatagtaagtccattgaagtacattaagttaaatgttgcaatgatggatacaggaatagatatgctgacaattaaagttgtgttgattcgtttcaagaacacatacaatacaaccattgctagcagcactcccatgatggcagagtcttttacttcgccgatagaggctccgatgaaatctccctgattactgattatatgaaactcataaccgggcatacttttctttagttcctctagtttttgtgtaatgttctcaacggcttgtacggtgttgtatttattttctttatagatgttaagactaaggcaacgttccccattgtatctggctaagtttttaggttctttgttgcgcagttcaacttgagcgacatcctttaagtagattggtgttttaacattggttgatgttgcggcattttctgaattttctgaaattgtaggtgttttgaaggctacgatgatattgctgatatcttccaggctttctaataagttgacaccttttatggagtattgtatctcatcgtttacgatggttcctccagatacatttcggtttaatccctctattttggacgcaatgctctctgctgtcaagccaaaagcatcgagcatataactatcggttttaatctctacgtaggcttcttcttgtccgtttaattgtatgtcagcaactccttcaagacggacaaattcactgcgcatatagttttctgcaatctttcgcaattcattcatgtccgtgatctcctgatgactcatggcaatagtcatcacaggtgtagcattcgcatcatatctggaaacattcagggatgtgatttcctcgttttgtccgatttgcgacatgctgcgctgtaaatccagaaaagctgcatccatgtcctgatcccaatcatattcaacagtgatcgtggctcctcctactttactgctgctgctaacctgttttacaccttcctggcgggctgctgtcgattcaatttgttcgataaattgtttctcgatttcttcaggaggacgttcacctgcttccaactcaatgtagagagccggattttttagatcaggaaataagtcagttcctaatttattgtatgaaataacgcctagtaagcacactcctaatgtgatcattaggacgctgaccggatattttactgcaaattttgttatgcccatagcgtcttcttgtttttacttcatcactttcaccttactgcggttgcgcaaccattcgtagccttttactactattttgtcaccagcttccaatcctttggttacctctacgtattgattgtcgctaatgcctgtctggatgactttttcttcagcattattgcgctccacggtgtagatgagtttgccgccacgacggttcttgatgatgtctttgggaatacataatacagaatctttactttctgttatcacatcggctttggcaaacatacccggacgcagttttaagtctggattattgatttcgatatagccggcaaacgttcgggagtcttcgttgatggccggagacaattgagtcaatacaccttttaaagtatcctgtttgatattgtagttggtgatgtgtacattttgtcctactgccagtttttctaaggcattttccgggaattgtgtctcgacatacattttgctgtagtccataattccgactagaatgctgcctgaagcgacttcaacattgggcgtaaagtagggtaggctcacaataacgccacggaaaggagctttgatattcatcttttccaatgtaatatatgcgttttccaagtctagcttggcattgatgaatgaattttcagcactatttacatccttctctgttgcaccgcctctttctagcagacttttttgtccttcccattctttctctgcaatttgcacctgcagttttttgctttccaactggacattgttgacatattctttattttccaggcggatgatgactgctcctgcttcaacaacatcgcctaatcgatagggacgaccggttttagggtttgtctgcaaattgtaatctccgacattctctgatttgatttcaatggtctttgcagcttttgccgtaccggttgtcgtgatgtattcttcgatatttctaaattgtacatcttcaatccataccggagtggtagtttctgaagctgaggaaccacggttgttattacaggaaaataatgctaatcccaatacaacaattccgattgtttttaaatgcgtattcataatatccggcttttcttatataattcgttatttttgatttcttttattttagtagttctacaggtagataagatttgttgttttcaaaatcccataatgtctgtattttgagattcaatagttctagtttatagctgatgatggcattcgtatattcctgtttggcatttgtcaactgtgtttggtattgttgcaaatccataccggttaaattgccattgcgatatttctccaagttgatttcgtaggtgtgttctgcattttcaatgcttttctttttgatttcgatttgtcggatgagggttggcagattcctgcaaatctgtcttacctctaaaataatattctttttttcttcttcaaagtcgactttgtttgattccatggcaagttcgcttgattttactcttgctttctttgcgccccagtcaaatatgggaatgttcagcgatactccgatttgttcgttgtctgtggggttgctgtacatgtcttttactttgccggcaagtgcgtccaagccgattcgggcactgatgctacctttgaactcattttccgattttgcccggatgatactgaatagatcttcttctagcgtaatctctttttggcgtaattccattcgctggtccagggcatacttgaccgcgtctgttgagttgacatttattgtattgatagctgtgttcggcagcaccataatgtcctcatccaatgatactcctaaaagcaacttgaaattgtcttttgtgttttcatagctgatttctgcattgtagaccgccgactcactggtggcgagatttacttctgcttgaaattgttcctcttttgcaactaaaccggcttcaaccttgtttttgataatttcgtaattctgtttttgattattgtattcgtctttggcagtattcaggtctttttgtttttggtatacttcatagaattgggtcgttacctgcttttcgatattcagctcttgcatggcatagctgatttttgcattttccaatgcatattctagctcttttaactgcatcttggtgcgattgtaggtaaagagtggttgctccaatcgtaatgagagattatgattaaaagaagtgcttttgcggttgtctgttttgttggaggcatcttgccatgaaagatcattgatcaaagagattgttccatctgtccacttgataggttgtacaattcccagtgaagctgatgaactcatactttcgttggcataccagcggctgttatagttgtcgtattgattgttgcgggtgtagttgaatgggttgacatccagtgaaaactgtgattttaatgaggcattttgtgcctttaggttcaattgttgctgctctagactcattttactttgtataagtgcagggctgtgctggaaagcgacctctaaagctttttccaaggtcagcacttcttgcgctgtgagttggctccatccgcaaatggttagtagtgtgattagcagtatgcgtcttgacatattcttcttttttaatagtttgttcaattggtttttgtaaatttaactgcatccgcaatgacatagtctccggatactttatctgttaaagttatagtggttgttccttgtggcaggtaaaaattacccaaggaaatccagccgggttcttcttgttgcagattcaaagtcattgattcctcttctttgccataactgatagtatatgtctgattgcgttctttattatcatgtcggcgtggtggccccatcctgttctgtttcggattccaaatggagatttcataatatccgtcctgttgtatttcggcactccagacgactgcattgttgccgctacccttgctcttgtaaaatgcggactgtattacatctccgtagcaatagtcggtggcaatggctgtccatttggaaggggcccaccaaggccagaagtttttgtatttatctggatcctctttctggaacaggtctttcagcttatgcttgttgtttgaagcgactgtccggaagcctgaatcttcattgtcaataacaaattccttggggtcttgattgaattctcgggcgtctattataaagtctccggcaagcgtatcttgtgtctctttctctatctttgaaaaagggaaccgatgcaatgcaggcaaattatgagaaatatttgtattgatgctgatgtttgccgggcgttcgtcagtgattatttttacttctttggcagagcctgcaggcaatagatagttttcaactacattattgttctggttccctccaaaaccatccatgccgcctcgtggccctcctcggaaattgccgccttgttgtatttcggctgtcaccagtgcgtctacatccgacggattatatatcttaaaatgtatctgatattttgtgacttcatcaatgactgtttggttggcatctacatctttaatgtacacaatgggcgaatggtcgtcctcataccattgttggagaaatttcgtcaggtcaatcccgaacttcttgtaaaattctgattggaacttattgaacggtattgttgtgaatagattattttgatagaagttcttcagaaaggttgtgaaatcttcttgactgatttgagtgttggcatagttctttaaagctttgcttttcagttttagcaattcataaaatatctcaggtttcagttctatatctgagatagcctctttaaagctatgcgtctctaagtatagattggctctttgtttatcatcgatcagacttccccagaaaaagttacttcgttcattatttaaactttgcatagtatttaatgcaatgtccagaataggatattcatctgtctggataaatccggtatggtgataaagcatggcatgggcaacgaatttattgacaagccggttgttccaatcccaaccgtattgtacattttcttcaaaaaaagtgctgcggacaaaattctggaagatgctggtagccatttcgatgggaccaggaattccttggtcgcggcgtctccagttttctcttcgttttttttcagcatcgaaatctgaatcgaggttaatgccccgctccggaataaaagcaatctccggcatgatatattccgtgtagcctttccaattgcggatgtaggcatggtgttgggcaggcgtttctgccataacgaatttgtggaacgggtagttccttccttgttctacttcgatgttgtttttcaattctctgataattccgggcaaagtatcttgtaaagctgtaaaatgtgctgaaaaatagtcgtgtccgctgaaataataaatcttgtattctgtagagtctacagtcaggcttttgctttcgtaatccgccatggtcaggctgatacaagggagagcatagcggttgttgaagactgttttattcccttctcgtttggcttctccttgagataatattgtttgtggaccatcataattaacgataaggttataatgagtgaaatctttttgcaaattgtaaggtgctgtgggatttacaggaggaatagctaccggataccagaggcattccggtgtcagcagtgtaaatttctcctctagccatgcatattttttgccgatagggaacatatgttgtttgtcggtgttgtccagataatctttttctaaaatatccgtgtagcagatggtctcgtcaattcttcctttgtacagaattgtcagttctgttttatctttgctttgtaatgtcttgtcaatgatgatagcttgtttgtcgcgttggaaagcaatgggggttcctttgctttcaatcgcagtaatttccaatgttgggttaagataaaggatgatttgcttgatgggtgcgttttgccggttgacaagcacaagtcggctttcgccttccagttgcttgccattcggcgtgacagtcaaggtatggtcggtaatgttgacgcgttgagcgtctgcataccggttgtaggtagttatgtattcgttacgtagctccatttttttgctgtgatggagaatataaagacctccggcagtaagtgctatggcaagacttgcagtacctaatgaatggacgatgatgattttccattgtttgtgcggcaaacgttttacgagagcaattgtgaaacagataaagccaatgccggccattagaaaaataaatcgttgcaacaaaaatatccggaggttgttgtgtcctgttacatccgaaaaaagagccggtatatgtgctccgaaaaaatcgaatacgccatagcaggcatctttgatatagaagaattccaatgcgatgactccaagcatgataacaaatgtaaccgcttgatttttcaccacacacataaccataaatgatagtcctaatacgaataggagagatggtaacgatactgtaaaaagataaaatatatagggaaatatcgaaaatggagcttttgcaatcagtatgtgcaaaaaggctgtgattaacaaagttatgatatttaatgagagaaatacccgtacaataccccaggtttttcctatgatatagtcggcattactcatcggacgtacataaatcacttcggcagtatcgagttttttgtcgcgctttaaaaaactgcctgccagaaaaatgacaatcactgattgggcgatgttataaaacgtgatgctgtaaaaaggaatttgcgatgcaacggcatgttccggccattgggtggcaaacatattgagcacaggggtcatataccacagaatggtagtggaaatacctaatagagccagaaatgcaaatatacggaacagccagcttcttcttagtagcttcacctcatatccggctatcgtatggatgttgtgcagattcatgttttatattattgaaataattctcctcctattttttcgctatacatttccatcttgtcttttagcaggtagtccataaaataaacgtatgcgtgttcgatgtttggagtaatctgcttgccgctgaatccctccggattctcggcgacgatttgaatttcccagcctccttctgaaggtattgtggaaatgataggatatttttccttgatttgttgtaattccggatcagtaacaaatatttcccacactttgcctgttgccaattgtatcatgtcatccggtgagccttggaattttaattctcctttgtttaataaagccagatttttacaggtgctggatatatctccgacaatgtgagtggagagaatgatgataacatccttgtcgcttacctctgataaaatattcctgaatcggatgcgttcttccgggtcaagaccggttgtcggttcgtcaacgataattactttgggattacctacaatcgcttgggcgatgcctaatcggcgcttcatacctccggaaagacggtttgcccagcggtctcgcacttcatataatcccactttccgtaataattcgtctacgacttctgcccgtttacgagtgcctttgattcctgccagtccggctccatagtcaagaaattcccaggttttcagtttttcgaaaaaacggaaatcttgaggcagataccctaatacggagcggattgctttgcgatctcgaaggatgtcataatcatcgaataggatagttcctgagctagggctttgtaatagtgtcataatgcgcatcagtgatgttttaccggcgccattgggtcctagcaatccgaacatacccggctcaatatccaaattcaggcaattcagcgccctatggccgttaggatataccttcgttaattctttgatttgaatcttcataagctggatgtataaaattatgcactaaaaatagcaaaatatagtaaactctgctaatgtcggtatctttttataataaaattaaccattgtcgttttacactcttgtgaattagacaaaaaaaatgtaggacggtttatttgctttatgccttaattccgcaacactattacaaatataactttttaagtacctgagcaacaaaaagttgctcaggaatttgccatgtcagatttttcacctatcttagtgttgcaaatcaaaatatgtatcaaacccgacagacatggcaaaggtagcaattaaatccgagaaactcactccttttggaggaatattttcaataatggagcaatttgactccagactctcatctgtaatcgactcaaccctcggtatgagatgcaggctgtatggttatcaatacagcgaaatcatccgttcgcttatgagcgtttatttttgtggcggctcatgcatcgaggatgtcaccactcatctgatgtaccacctttcgcttcatccgacacttcgcacatgcagtgccgacacgattcttagagccataaaggaactgacccaggataacatttcctacacatccgacactggcaagacctacgacttcaacacggcagacaagctgaatacactgctcctcaattgcctattgtccacagggcagctgaaagagggcgaggggtatgacgttgacttcgaccaccagttcatagaggctgagaagtttgatgcgaagcctacatacaagaagttccttggttatcgccctggcgtggcggttattggcaacttgattgtcggcattgagaacagcgacggcaacacaaatgtccgtttccaccagaaggacacgctgaagaggttctttgaaaggtttgaacaaaacaagcttattatcaaccgtttcagagctgattgcggctcgtgttctgaagagatagtggaagagattgctaaacactgcaagaccttctatatccgtgctaaccgatgcagttcgctctacaatgacatctttgccctcagaggttggaagaaagtggaattgggcggcattgagtttgagctggcctccattctcatcgagaaatggaaagggaaggcataccgtcttgtgattcaaagacagaagcggatagacggcgaactcgacctgtgggaaggagaatacacctaccgctgcatccttacaaatgactacgagtcttccgagaaagagattgtcgaattctataacctccgtggagggaaggaacgcatcttcgatgatatgaataacggattcggctggaacaggcttccaaaatcctttatgggagaaaacacggtgtttcttctgcttatggcactcatacgcaacttctataaattcatcatggcgaggcttgacgtgaagaggttcggactcaaagcaacaagccgcatcaagacgtttgtctttaagttcatctctgtgccagccaaatgggtcaggacatcaaggaagtatgtgctgaatatctattcatgcaacaatgcttatgccaatgtgttccagaatgactttggataacaccgacaacttatagtcgtgattttgcgtattgcctcaagtcgcatggtggggtaaggggcatttatatgtctttatggtgacattcgatgcactgtgccccctttttactaacgatgcagattcttttcgcttctgtatcatattaggcgcgtagttgcggatttgaggttatggaaaaaatctgtatgattgttatatgaattattagagttttggacggtgtttatccccggaaaccctttcacgtctcgaaatttagctgtatctttgtttcaggagaaacataaaccaaaaaccatatgagatatctggaccccaaagccgatctgacattcaagcgggtgttcggtgaacaccccgacttggtgcgtagtttcctgaatgccttgcttccattgggtgaaggtgaggaaataagagaaatcgaatacctgcctgcggaaatggtgcccgacaaccctttgcgcaagaacagcattgtagacgtgcgctgccgagacatccgcggacgacagtttatcgtggagatgcaaatggtatggactccggaattcaaacaccgtgtcctgttcaacgcctcgaaagcctatgtgcgccagattaagacaggtgaggactacgagctactgcaacccgtctattcactgaatcttgtgaacgatgtcttcgagcctgagttgcagggttattaccactattaccgcatggtgcatgtggaacatacggacaaggttatcgacggactgcacctggtgtttgtggaactgcccaaattcaatcctcataccttcagcgagaagaggatgcacgtgctttggctgcgctacatgactgaaatcaacgaacagacccgtgagataccggaagaactgctggagaaccccgacgtgcagaaagccgtaaaatcactggaagagtccgccttcaccgaagcgcagcttgccggctatgaaaagttctgggacaccatcagtgtagaaaaaacactgataagcggtgcagagaaaaaaggtcttgaaagaggaaaagctataggtcttgaaaaaggaaaggtaatcggtcgagaagaagggaaagccattggtgaacaagaaaaggcctgccaaatcgcccgtcagatgaaatccaaaggatattctcttgatgtgattgccgagctgacagccttgtccgaagaagaaattgacagattgtaaaccacctcttatacaagtgcggtacaacaagcagccaggtttcaaagtttcgttgaaacctggctgtaaaattaactttccgagagtaatatatttactctatggaggtgatgcaaatagtaacacgatttttttctgctgtagcaaatggttgtaccgtgtcgccttttgaatcgactgcaatacgttctttagctataccttttgccaccaaagcatcggcaacggcttgggctctcttggtggaaagcgttttgttaaagcggggattaccggtctggacatccgcatatccggtcagtgataccttcgctgtcggattcttcttcagataagcagccagctcgtccactttggcggcttcctccgagcgtataacggcagaattgattttgaagaacatgtcagcctgcattggttgaggtttttccacctttaccggcacaaccaccggtttcgtttcctgcttcggttcttccttcggagcaggagtctgctgcggtatcggagcgggagctgccttcggtgttttcttggtatatccttttccgaatcggatgcttacaccggcaaggatgttgaactaccagtcggcattcccggctttcttcgaattgaaatggtcggacattgcatttgcattgccttccaggttgaatgccactgcatcgcagatgcggaaatccatccccacacccagacgtcctgccacgaaagccttggaatcgtcccacaggtgttgcagtttataccccgcagcattgatggctacggcatcatcgttgttaaatgcgatgtttgcgccgacacctgcaaagagatagggattgaagaaacgtttgtgattgaaccctccgaggcagttggctatatcaaatgtggcatccacattcagctgtgcataattgaatttatactcctgctgtggattcacccagcttccttttccctgccatccgctgaagcctcctcgcaagccccataccggagagaaacgatagcctgccgacagtgcggcagcgggcgaaacaaggtcggaaaacttggcttcaccgatggtgtgaccgatacctccctgcacctgcatgtaccaatgcgggcggaactcaatcttttctgtctccttctgtgcgaaaagagaagaagtgcctgccaaaagcagggctgccagaattgtttttttcatgttcatgataatagattttgtggttttatgaatcctttactcaatggaatgatctcccagacccttcatacaaagactccagcgaccgatataacgaactggtttaaaatacaggttgatacttttattgtcgggagtctgaatccggcacttcacctcattgttttcagaactcaaaaatttaacatattccaatgtatagtctgccaccgggaattgactcaataccttcatggcttcaacgaactcttcccgatttaatccttgcggctggctattcggctttatagtgcgcagcaacatcaaagcagaatcccggtgttctgccttcatccgctccataaacatagtgacaagcgtcttgacagcggctgaatctctagctcccactatcatcttgtccggatttgtcgcataaacgatttctgattttttgcttttgtcacgacaagcacccaaagccaatgcgagcaacagtaataatcctattagtttcatgagtaaaacggtatttgataaaaaaaggagggcttttacgccctcccttgtcaatgatatgcgtattgcaatattttattgaccgatggttttcttgactacaacgggtatcatcacattgaaattaccccatttgtaagttacatttaccggcacatggatagtaatgtcgctagacagtgttataccgtcgttatgccaagtaagttctccgaagttgcctttttgaatgtcttcagcagttgctgctgtgtatgtgataaccgctcccggataaactgctgccagtttcttgtctcccaacatgatgtcggcaacgctgatactgattgagtttacaccgtagtgtttgaaataattcaagttctccggaacaaacttaaagtttctccagtcaacaaattccataactttgtttagttccaatggtgaaccgttatctgttccgtcaattaaagagccttctttgatggaattgatggaaataggacgcaggaacttcacgtcgaatgtgttgttctctactctcagtttttggtcgcagccattcttgacattgacttgaatttttgcagtcagtgtttggtaatctcctagttcagagtgaccagcatgattcaatactgctttggcaatgtcattttcctgataagttacatagttgtttacagcatcgtttgagttgacagtagtcaatacagctaccggagtaggagttcctaccggattgttgcccttcaacagtgttgcgtatagagttaatccgtctttagaaacagataattcatatttgttgttgtctgaaccttgtactcttttttcgtcaggagtaacaaatacgaattcttttatcaggttgtctgctttgaatgattcgtatgtatttacgtcaataccgctgatagtaacttttttgcctacaaatacattcaggatatcttgttcgaatttgcaagtttgtgaagtacttggtacctcaacattgaagtgaacttctttgaatcctccgtgttctgctgaattttccttgaaccaagcgaaatcaactttagtatttgcatcatccaagatttttccgttcggatctgcgttcagtgttgtcggtttccaagtcaatgttacatatacatagtggtttgtattgttggcatttttcttcacgaagcggataatgacggtagcatctgtcttgcctgctgagaatacattgtaagcctctgactggtcaatattccatttcagtacttctgtcatttctccacctgctgtttcctgagttttgattactgaacccaatcttttttcgactttctctgcatcgatggttgtattggtgtattgttccattgtttggccggcatagaaatccagtctgtaattgttttcgaattcttctttggacatgttcaatgctgcatagatgccttcctctatctgattccaacgcaaattgaaattgtattctgccggagtgcaaccaacggtatagttatcagagaaagtgaaggaagcaatatgtttaacttcatcgaccggagcaacttcttctttgtcagtaatcttgaatttgatgtaggctacggatactacgttgtatgtggtagtatcaattaagcttacgcgtaccaatggcatacgaccgatagtagaacggttttgttcgcctttatcccaagtctgctgttgtccgtttactgtggcttgtgcacgcagtctggagcctttcatggcagcatgcgcactttgtgatgtcttgtttgctcctgcatggtatccgaccaaaccatattcatattttaatccgtaggctttgatttcacctgtagctgcattttcgtcaagaccaacgtgcacatattcatcgctttccagagcgaatctgtcaacgtgtgtagccaccaattctgcaacatcaattccatctgcgtcattccaaaggattttgaattgtggttctgcagcaatggcagcagcagctgttttatgaaaattatgctcgtggaaatcttgcaaccctttttctgcatcagctaaaacaaaatttctaatttccattgcttttacagcagcgtaatcagaagtaatcagcgtatcgcctttttctcctttagttcctacctgcaaagctaaagttgtaactttaccgtcttcttctatgtctttcaacaagccactgtttataccagcctgaacagtcaatactccatttgaagcactgaaatctgtgatttcaattttgttttctcctgctttggtatatactttgtcttcacaaattaaaaacatgttctcttttttcaaaccgctgactgcagcatttgaaggattcatgtgatatttggcaatcaaatttggagttatagaatatttgtctccatctgtagcagcatcatcagcctggtctttatttgcatcaagagtcggatgtttcaatttctgaacattatagaagaatgtatttgcagacattgcttcaattccctgataataaagttcaggcataaacactaggctctgcaatttttcagaaatcagttttaagttaaccggttcgttttcgccatatttgatggtgtaacctatgattgtgccagccgcatccttaacttctgtaatggtcagtccagggatagttacctgtggcagggtaactcctgtcggctcgccataatacaatacaacgccatctttacctacagttaaagcattcggatcgaatgaattcattgaacccaattctttgtcaccatatttgataactactttacctttttctcctgcagtgatagttaatttgttttcatcaaaaccttcaacttcatttttaggaattgtcacaccggtttttactccgttgtaatagatgcaaccatcttcagcattgaatgtcaatttggacgcatcgaatgcttccggcatgctaggcatagtgaatgttggagcagaaacgacttcacctttatcatttttcaatgtaatggtaatcactccaccctcttcttttgtttccaaggtgtacttggtgtttccatcctgagtatcggcatcttcgattttgtaagttacaggattaccggttgccggagtgatggtcaatgtacgagtagactcgtcccattttacatcttttacataagcaagtgctccgaaatcttttttcagagattcaatgcttttgtttacagcgtcgatttgttcttgcaggccatcaatatcatcatcgtagtctttacaagactggatagatgtagagaagcccaacgctgcacacaataaaactgcgtaaaattttgttgattgtctcatttgaaataaaatttaaattttaaaaaatggttttcttctttttcttactttacttgttgatttagctgttgtcgtgatgttaaacctcctttttatatttgttttaactgtgatgtgcataaaactctctgcccgtaatgatgtgtaatattgacagcatggtgtctggctgtgatgaattggtaacgggcagagagtcatgcacgacacttagtgtatggtattttgtttgatcgatgtaattattaggtatacagtctgttgtgtatgtaaaaaacgtacgttttttatcaagggaataaagcttggaaaacaagaaaacaagtagataaaaaagtaaattgtattggaaatgcaagatattgatttaaaggacgtttacgtgtataacaaaaaaaagactgctttgtataaagcagcccaatgtttttacacaaaaaaacgtacgttttttatatctcacatctatatatttgtttgatatttgtttttattttgctgcaaaaataattctattttttgaatattgctaatgaatgtcataattttttttcaaaaaacacggcgcttcattttgatttgccctcattgggctttctttgcgccctctcctgtccatatcaaatatatgtcatttatatatcaaagataagataaatataagataaagataacagtttgttatctttgatatataggtgtcatatttttaagttgagtatatgtgagatttattaaataatattggttatgatatatggatatattagagtgagcagtgatcgacagacgatagaaaatcaacgattcgaaatcgctaatttttgtaagcagcagaatatccggattgatggatggatagaggagactattagcggaaccagggcttacagggatcgtgaattgggacggctgctggatgaggtgaaaaagggggatgtgattatttgtgcagaattatcacgcctggggcgcagtctttttatgattatggaaatattgaatatctgtatgacaaaagagtgtaaggtttggacaattaaagacaattaccgtctgggtgaggatattcaaagcaaggtgttggcttttgcattcggtttggcggcagaaatcgagcgtaatttgattagtatgcgcacgaaagaggccttggcaaggaagaaggcggaaggggttgttttgggacgtcctaaagggagtcggaaatttaggcgaaaagctggtcagggaaaatgcaaaatggaataagtgtatatttgtgtggcaataaaaatggaataagtgtgtttcaggcgaaaatttcgcggatgacttggagggctttgctattgaaatttaaattaagatggtattgataaaatagtaataggacatcaagcaggacgttgcgtgctgctcggttaagcgggatattgcgtagggattcgatggggcaagtacacagcgtgtgtatgatacgtgctgtgttggggccggatacgcatgaggtggaggtgtctgtaggatgaaagctgccgtctgtcgggcaaaaaaggtagccctcttgccaggtgtcggtattgatgcgataaccaaggggtaggcttagcctatataggaagcatagattgaagttgccggtgtcgccttcgctggagttcaagtagtctacagaacgggtaatatagtggaataatgattcgtttttgccttcgttttttagcaagatatgtaatatttcaccccagagtaataggatattcattttaacgatatccatgtaaaggtgggggagactggtgagtgggtctgctgttttcagccgatgtaatccgccgcgttcgttgggtagatattcaatctcaacggtttggaaggggtggattgttttggtcttgcgcttgaatagagcggatggggctatcatggagagatagcctctttctttcgaatacaggtggatgattttcaatgcatccgagtatccgttgattttcaatacaatccctgtgcagacttccggctccattgtgattatttttgtcgggtcttcaggaaatcgacaagtttggatacggcgcgtccgcggtggctgatgctgttttttgtgtctaaatccatttcggcaaagctttccttgaatccttcgggacggaatatcgggtcgtagccgaagccggcacttccgtgttgttctgtgaggatttctccgtcaactcgtccttcaaacagatattcttgaccatcgagaatgagggctatgatagtacggaagcacgccttgcggttggcttggttttgcatgttgtccagtactttttgcatgtttgctttcgaatctttggctggtcctgcatatcgggcggagtagactcccggttgtccgttgagagcttctatttcgaggcccgtatcatctgcgaaacagtcacagccaaagtgttctttgatatagcgtgctttttgcagggcgttttcttcgagcgtttcgtggtcttccggaatgtcgtcgtggcaaccgatagcttcaagcgggataatttcgtaagttccctctaatagatgggatatttcttctaatttgtgtttgttgttggtggcaaatactaatgacatcttattatttgttgatattatgcttatactttatttttgtgcgaaagtacgggtaaatatttgtatttcctatatgtgggatttttttagaatgttatagtaaattgtggttgattgcgtaatgtaaggcttctataatattcctgacttcaaatttggcgaataatatttttttgcatgcttttatagtgtctgttgacttgcataatttgtcagcgatttcatccattgtatagccttgggaggaaaggattaagatgttccgttctaattcttttatggctgcatgttctttttttatccatttgtgcttttccaatgaatattcgtaatatgaagttgaattggatttgtttgtgacgatgcagtttgaagaattgtttgttgatatagatatgatgcatagcgctagccatatgtgaccttttcttgtcaatgcaatgggtgtgtaatgttggtttattaattttagttctttgccgtgtataatatggaaatcgtatgaaattgagtagtcaagacgttcagatataggtatttcattgaataaatcaaaaccctttttgtttatttccaatagcgttttttgttcattttccgggatatatttcaaataaaagttatgacccattttttggatttcggcagacgacaacccgtaccaatatgtcatattttctgaaacatataaaaagttttgtttgaaatagtcgatgatatatatgccgttatgtatgtttcttgaaaaagctttggctgcatttataaggaaatcgattccttgataatctttgtctgtaatgtcatttacaggattggaatccaagaatatgtcatgtatattacccattatagtatatgattttgctataaagttaagataattttttttgatgtattgcatttgtcatgaaaaaataattgttatgctgttgtttttttacacttttgtgtcaaattattgccagtccttttgttatgtttacattgaaattttagcagttatatcgatataatgactataagtacagaccacactgtttaaaggagtattccgatggatttagaatcggatggtgatttataataacttaaaattgtattttataaaaacggaagattttataattattaaagagacagaagttttggatgaagtttctatggataacattaaaggtggattaacagatgattcgcaattatgttgtcttattaacagccattgcaactctaataccaataacaaaggtcagggacaaaggagtgctgcaccgaatgataatggagggttggtaaaataaaatggtttaataattttagattctgtcttcttacagaagacagaatcttataatattttttattatgttgcaattatctatctatacatatatttttcagcatgctgaaaatttttatttatataatagtgagcatggcatattagcatacatttcagaaagattgtatggcttgctatacaatcgggattttacttctattccttctaatacacgaaaagagttaattgggaaaggtatcttggtagaagatgatgaaatatatatgtattatgatgagatgaaaatgcgttttttatctgcttcttatgataaagagcatttaggacttgtcattgttccattttcgggatgtaattttgcttgtccttattgctttgaaagtaagaaacgtcctgaattcataagcgaaaatatagaagatgagttgatttcttttgtaaatgcacattcagcacgaaatgtgatgcttacatggtatggaggagaacctcttatggcttttaaaaatataaaatctatttataataaacttataaatcagactaaggtcaacatagaaagacatgaaattataactaatggttatattctaaatcaagagatgttggacttttttcaagaaacgcaccttgataagatgcaaattacattagatggcacagagaaacatcataataaaacccgttttttaaagcataataaacaaggtacatttcatgtggttgttgacaatattcggaaggcagttgctaatttacccaattgtcatatagcaatccgaataaatattgataaaaacaatgaaaaagacttcttcgaaatttatgagatgttttgtgaagaatttaaagataaatcgttaactatttatcctggatttattagaaaagaaacccctgatcaccattctttgtgttatgattcaataacgagtgagtatgtttgcactttttatgaaaaaattaaagatttaggtggcaatgttgattttttccctcgaagagcttctaaaggatgtatggttaacaagcttaactcatatataataggaccagaaggagagatttacaaatgttggaatgacgttagcaattctgaaaaaattgtaggttacattaatcaaaagcagatagtcaataaacctctgctttaccgttatatgaatgagacatctcctttttccaatcctagttgtagagactgtcttttatttcctatttgtagcgggggttgtgcttggtatcgatataaaaatatatttgagaatggtagatttaatatttgttctcaatttaaggaacgaagcaatttggaaaaagcattgataaaatcattagaaaaacaaggagatttaaatacattaaaacaactttacgtatgaaaaagattatgctgtcatttctttgtgtcctgttttcatttgttgtgtatggacaagatatttatggtcgaatagtcaaccaggaaaaccgaccggtcgaatatgcgaatgtggtggcattgacctctgattcgttgctggtatccgggacgattagcgatgctcagggagaatttcgtctgtctttgtataaacaatcactgcatgctgttttgttgaaaatatcattcattggatatgaagacaagtatctgaattgccatgatggcgatattggaacaattcagctagttccttctgctgtgcaacttaatgaagcgaaggttgcggtgcctgaatttgaattaacttcagaaggtttgcagactaatgttgccggtactttgctcagtaaggttggtacggctaatgacgtattgaaacgattgcctaatatacaagggagagacggaaattttacagtatttggtaaaggtactccggttatttatataaatggtaaggaagtgcgtaatacgactgaattggaagcatgtagttctgaagatattttgagtgtaaaagtaattacaaatccgggagcgaagtatgataattcggtcaaatctgtcatacagataagggtaaaaagaaaagacggagaaggtttgggtggacgtgtgaaaagttcttataagcaggcgagccggagcgaattcgttgagcaggtttcgttaaattaccgtaatgataaattagatttgtttacaacgctgtattatgataatgtgtttcacaagcagaaacaatcttcgatacaaaatatttatgataaagtggaacagaatgggaatacgactatattgacacatacacaggaattgtatggatttgcaggatttaattatggatttaatgataatcattttattggagcgacttataccattgaccgtaaacctggagatggcgagacaaatatcaataatactgtttcagagcaaggagttgctccatggaatgtgaattatcgacatgatctcgatatgcccgaaggaaccgatcatcagatgagtgcatattataatggtaaagcgggaaatttgcagatagactgtaatttagattatctctatagtaaggatatgaaagatcaactgactacccgacaagcagaagggaataatttaacatatataactacagttaattgtatgcataacaaattattggcttccaaattaatactttcgtatccattgaaaaatgggcaggttgatgtgggaagtgagtatacttacactcggcgaaacgaaacatttgaaaatgtggagcaattgctttacgataccgatgataggataaatgaacgtaatattgcagtttttaccagatatagtatacaatggaaagcatggatgttggctgctggaatacgataccaattcactcgctctaattattatcagaaagaaataaaagtggcagaacaaagtcggacttataataaatggatgcctgaagcatctctaagttatagcggtgataaattccagacacagttgagttatgggatcaaaatgacacgtccattttataatatgttgtcaagtaatgtgcaatataatgatcagtatacgtatgagggaggaaatccgttgcttcaaccgtctgtttttcataacttgagtttggaggtaatgtacaagtgggtatattttgctgcaggatatatccataagaaacatgaaatattaaatatcgacaaaccttataatgacaatgcggttttgtttactaatgcgaattttgataagatacaagaagttaatgctatgcttagcctttctcctcattggggtttttgggaaccggtgtatagtgtcagtgtgagcaaacaatatcttgatagtaaagcgttgaaagtgaaagaagaattagagaagccgatatttctatttaaactgaataattctttctctttgcctcaagattggactcttggaattgattatagctgtaacacggacggtcatagcggtactgccatgttaaagcatagcaatagtcttgatttgcacgtcgaaaagttttttttcaaaaaacggcttttgttcagtctgcaaatcaatgacttgttaaagaagagttataattcttttatttactatggtagtcttatgagtatgaatatccgaaattacagtgatagtcgcaattttcaaataagtttgacttatcggtttaattatgctcgtagcaaatataaaggatccggtgcgggtaacgatgaaaaaatgagattgtgatcaatcttgttgggtatgaaaggatttcccatacatttccagcatgattctatgcaatgtggtattgcatgtctgcagatggtgtgcgaatattatggtagaaaatatacgttagagcaacttgctgaaaagtgttatgctactacggagggtgtttcgttgcttgggattagtcaggctgctgaaagtatgggattacatactgtgtgtggaaagttgacggtagaacagcttctaccggaagtattgccttgtattttgcattggaatcaaaatcattttgtggttttgtatcgtgtgaaacggaggagatattatttggcggatcctggcagagggcgggtacagcttgatagagcggagtttattgcacattgggtaagtacgaagtcacagggcgaggataaaggtatagctatgatgttggctcctacacctaaattttacaatcagaaggttaggtgtgaaaaaaaagagtcgtttttatttttgtggagatatttttgtcagtaccgaaagtatttttttcaattgtttttagggctactgttggaatgtgtgttgcaacttattatgccgtttcttacacagtgtgttgttgatgtgggtattcgttataaagatgtgaaattaattgagttgattttgcttggagagttgatgattgtgatagggcgtactgctacagattttatccgccgtcaacttttacttcatatttctatgcgaatgaatatttcgttggtaagtgatttttttataaaattattgcatttgccaatggcattttttgataccaaacgaatgggtgatttgttgcaacgaatgaatgatcatgaccgcatacaatcttttcttactacgcaaatgctaggtgtgatgttttatttattcagtttgggtgtgtttggtgtgatattgtttatgtatgattctatgatatgtggagtattcttgctaggaagtgtagcctatattttgtggattaaacatttcttgcataggagaaagattcttgactatgcattgttcgagcaacaggcactaaatcaaagtaagacatatcaattcattatttcgatgcaggaaattaaattacaaaattgtgagcagcgtagacgttgggaatgggaggatgtgcaggctgatttgtttgcagtgcagatgaaatctcttaagttgcagcaggtacaggaagcgggtggtgtttttatcaatgaattgaaaaatgtgggtattactgttattgctgcgactgcagttattgatggaactcttacgttaggggctatgcttgccatacagtatatcataggacaacttaattcacctgtagacagactgatggattttatttattcgcttcaagatgtcaaactctcgcttgaacggattaatgaaattcatcttaaaaaagacgaagactctggaaataaatgctttgattttttcggtaaggatagggatattcgtgttgaacatgtcgatttccaatatgacccgcatgcattatggaaaacacttgaagatataacttttacgattcatggaggtgaaatcactgccattgttggagctagtggaagtgggaaaacaacattgataaaattgatgttaggttattattctgtgatggcaggcaatatcttgatagcagatagaaatatcaataattataatttaaagtggtggcgttgtcagtgcggagtggttatgcaggatggtatgattttttctgaatcaatagcaagaaatattgcggtagatgatggtgaagttaatgtggaacgtttggaaaaggctgctcgaatagcgaatatacatgagtatataatgggactccctttgaaatataatactcagattggtagagatggtgtcggattaagtcaggggcaaaagcagcgtattcttatagcaagggctgtttataaaaatccatcattcatttttcttgatgaagctaccaatgccctcgatgcgaaaaatgaaaaagttattgttgaaaatttaaataagttttataaaggtcgtacggttgttgttgttgctcataggctttcaacggttaagaatgccaaccaaattgttgtgcttgacaacggcaaggtggtggaaataggaaatcacgtttctctcataaagaagcagggcgtgtattataatttggtgagggatcaattggaattaggcaattaatatgaaaacaaagaaaaatcattattccgatttgatagaacttcgttcggaaaaagtacgcaatattatcggcgtaataccttctgtgttggtacgttgtagtatggctgttattgtagttatttttgtgatacttatcttggtggcgtttttagtgccttatccatatggaaacggtgaatcaattttccgacattttgtacattgatttggataaggttaaattccgatattacagtgtggtagggtgatatttctatctgttatgattatctttgtcctcggataatggataatatgattgtatgttaaatgaaaagccttatgcagaaaggaatcgtagttaaatcaacgggtagctggtatattgtcagaatggataacggagagattgtggagtgtcggattcgtggacgttttaggatagaaggtatccggacgaccaatccggttgctgtgggggattgtgtggtagtggaaatggggacggaaggtggtgtgattaccgaaatagaaccgagaaagaattatattatccgaaaatcaacgaatttgtcgaaggaatcgcatatccttgcggcgaatgtagatcaggcgttgttggttgttacggtgaatcatccggtgacatccactgtgtttatcgatcgctttttggcgagtgccgaggcttataatattccgacgttgattgtttttaataaggtggatttgtatgatgaggaggatcaggcgatgttgggtgggttgatggcgatttatcggaagataggttatacttgtctggcagtgtctgcggtgagggatgagggagtggatgaggtgcggaaaatactgaatgggaaagttacggtcctgtcggggttgtcgggagtgggaaaatcaactttgattaatcgggtggaaccgggtttggatttgaggactgcaatgatttctgatgcacatgattccggcaagcatacgacaacatttgctgagatgtttcctttgaccggagggggaagtattattgatactccgggagtgaggagttttggagtagtggatatgaaaaaagaggagatttcgcattttttcccggaaatttttgcttgtgccggagagtgtcgtttttataattgtacgcatacgcacgaaccgggatgtgctgtgcttgaggcggtggagaccggtgaggtaagcgagagccgttatgccagctatttaagtatgttggaagagagcggaaagtatagataaatataatttttcatgttttgcttttctattgtaagtttttgtgctatctttgcgccgttttacttcaaaggacgtgaacagattgaacgaatataagatagcattcaggggattgggagagggaaagcactcttttgatttcgttttggactctgcttttttcgattgcttcgaggcaaccaaaggcacagagggcaaagtggatgctgttgttgttattgttaaaagttctctgctgatggaagtgaagataaaacttgacggagcggtgaaagctgtctgcgaccgttgtttgggagaattggagttgccgatacatggcgagatggagttgattgtcaaacaaagcggacgcgaagaggggaatgacgatgattatattatcgtaacgcaggaggatgattttttggatatgagtacttatctttatgagacatatatgttgaattatccgatgcgtgttgtacatgaagatggagagtgtgacgaaagcatgcaggaagtgctccgtgaatatgtaagagatgaagaagagaagccgatagacccgagatgggacgagcttagaaaattaattaataactaaaaataacagagaaatggcacatccgaaacaccgaacctcaaaacagagaagaaataagagaagaacgcatgatgcaattacttcaactgcaatcatgaagtgttctaattgtggtgctgctgtaaagtatcacaccgtatgtcctgaatgtgggtattacagaggaaagttggctattgagaaagcagtagtagcataatcttgtcactaaaggattgtttagattataccggccagcctcctatgttgtagggggctatggtcgtttaatgatttggattatcctgtaaaattgtttgatatgaataggccgagagctataataaccggagtaggggcttactatcccgactatattctgaataacgaggagttgagccgtatggtggacacctcggacgagtggatcatgactcgtgtgggtatcagagaaagacgtattctgaaagatcctaccaaaggaagtgcgtggatgggagctcaggcggtaaaccaattgttggaaaaaactggaactaagccggaagaggtcgacttgttgatttgtgcgacagtgaccccggatatgcacttccccgcaaatgcgcaggtgatttctgacatggtgggtatcaagaatgcctttggatttgatttgaatgcaggatgttccggattcttgttcggattggtaactgcaacacaatatgttgagagtggacgttacaagaaagtggtttttgttggctgtgaaaaaatgtcggtgattactgattacacagaccgtaaaacttgtcctttgtttggtgacgctgctgctgcagtattgttggagccgacagaagaaggactgggtgtaatggaccatattttgcgttcagatggtatgggacgtgatcacttgtttatgaaagccggaggttcgttgaatcctccatctattgaaacggtgacaaatcgtgagcattacattttccaggacggacagttcgtatttaaacatgctgtaaccaatatggcagatacagcggttgaaatcatggagaaaaatggtttgaagccggatgatatcgcctggttggttcctcatcaggcaaatttgcgtatcattgatgccaccgggcgtcgtatggggctggagcctgaaaaagtgatggtgaatattcaaaagtatggaaatacaacttcagcgaccattccattgtgtttatatgaatgggaaaatcaactacataagggcgacaatttgattcttgccgctttcggtgccggatttacatggggtgccgtttggttgaaatgggcgtatgacccgaaaaaataattgagagtcgcttggatgcggctctttttttattaaaataatttttttacctttcgctcttgttaatcaacataattgctaatacaaaccatttatggaagttttgatattgattcctgcccgttatgcctctactcgattcccgggtaagcctttggctatgataggaggtaagccgatggtgcagcacgtggtggagaaagctgctgcagtttctgaaaatgtttatgtggctacagatgatgaccggatttatgattgtgtaatcggttttggtggaaaagcggttatgacatcaacggaacatcgtagcggtacggatcgatgctatgaagcttaccggcatgtggtagaacagaccgggaaaaagtatgatgtggtggtgaatattcaaggtgatgaaccttttatacagccggaacaggtgaaggcgttggttgcctgttttgaggatgataaggttgagattgctacgcttgcgaagcggtttgagcagaatgctgatatctttgatccgaataaagtgaaagtcgtttgttctgcaaaaggtacagctttgtatttttcacgttcggccattccattttgtcggggtatcgagaaagaatgctggttggagatgactcctttttataaacatgtcgggatgtatgcttatcgtccggaggtgttgaaagagattacagctttacctcagggaagattggaaaaagctgaatcgctggagcagttgcgttggttggaaaacggatatacaatcgctgtgcgtgaaacggcacatgagtctattggtattgatactccggaagacttgaagcgggcagaagcggttttgagataaaaaaaagggattttaatcccttttttattagatagtcatgatatctttttctttctgtataagaatttcatctactttcttattgaaggcatcagtcattttttggacttcagcttctgcatctttggcagcatcttcagggagtccgtctttcaccatttttttgaatgcatcaatggcatcgcgacgggcattgcgaatacttacttttgctgtttctccgacacctttggattgttttaccaattctttacgacgttcttctgtcaaaggcggtacattgattcgtacgatttcgccgttattgtcaggattaaaaccgagatttgctacaagaatagctttttgaataggtgccaacatactcttttcccaaggctgtacagcaatggtgcggggatctggtactgtgatatttgcaacttgggaaagtggggtaggtgagccgtagtagtctaccaggacatcattcaggatttttgggttggctttgcctgcccggattttagccagttcgttatcaagatgggcaagtgcattttgcatgagttcttttgcctcatccatgtacattttaacttcctcgttcatatatgttcgtttttttgtgtattctttatggttgcaaatatagggataatatcaattatttcaagaataaaacctaactttgtacctcttaaatactaagcggatagttgaatatgacaagaaaagattttgaaataatggctccagtcggttcgtacgagtcgctttatgctgctttgcaaggaggagccgattctgtatattttggagtggaagggctgaatatgcgtgcgcgttcgtcggcgaattttaccttggatgacctgaagaatattgtatctatatgttctgaaaaaggggtgaagacttatttgacggtgaatacggtgatttataacaatgagctggagaagatgcggaaagtgatagattgtgccggtgaagctggtgtaagtgcaattattgcatctgatttggctgctattttatatgcacattctgttggtgtggaggtacatatcagtacacaatgtaatgttactaattttgaagccttgaagttttttgctcagtgggcagatgtagtggtgttggctcgggaagtggtgttggatcaggtgatggagattcatagacagattattgaacaggacttgagagggccgaagggggagttgatccgtatcgagatgtttgctcatggtgcgctttgtatggctgtttccggtaagtgttatctgagtttgcacgaacggaatgcttctgccaatcggggtgcatgtaatcagatttgccgtcgggcatatacggtgaaggaccgtgaaaatgaaatagagttggatattgagaatgaatatatcatgtctccgaaagatttgtgtacggtgggatttgtcaataaattggcagatgccggagtgagggtgttaaagatagagggacgtgcacgatcggcggaatatgtgagaaccgtttgtgaatgttatgatgaggctattcgggcgtatttggacggtagttattcggcagaaaaaattgacggttggaaaaaacggttggcaactgtatttaacagaggattttgggatggctattatttaggtcagcgattaggggaatggagtgaagtgtatggatcgaaagctaccaagaaaaagattctgttggggagagtcacaaattatttttccaatttgggagttgctgagtttaaaattgaatcatttgatttgaaagtgggggaagaaattttaattcagggaccgacaacgggtactttgcaaatgacagtgccggaattgagattggatttgaagcctgtggagcaggtggagaaaggtgatgtgttttcaatggcaacctctgagaaggtgagaaggggcgataagctttataaatgggtggatacaacaccggagatgatgcaataaattaattaatgatagaatatgaaaagagtagtactgtatttaatgcttggattgctgtgtttttcgtgtattcaaaaagaagcagcaaatactgaggcagatatagaaacgtgcgttattttgaacgagcatgagcaacctgatcctaatattaagggaaatgtaattatcagtaatacaagggtgatagcacaggcaacaccgattattgatttgacaaaactggctttggatgtgacattgacagaaggcgcaaccattactccgaatccgagagaagtgagagattattcgcatccgcagtcttttgttgtgacttcggaggacggcgaatggcaaaaaacgtatcaggtgagtgtggatacgtttgatttgccggtgaaatatacgtttgaattggcagaattgaatcgggataataaatattatgttttttatgaaacaatagatggacaaggagccaatttcagacaggatatatgggcctcgggtaatggcggatattcattgaccggtgtaggcaaaaaaccggaggattttcctactgtttctgttttggagggtaaagaaggaaaaggtattaagctggaaacaaaaagtacgggcggttttggggagatgaagcatatgccgatagctgccggaaatatgtttatcggtaattttgatgttgcaaatgccttgaaagaaccgatgaaggcaacacgctttgggttgccatttggaaagaagcctttgaggatgaccggttggtataaggcaaaacggggaaaagtcttgacagatgtgggtgaggatggtaaggcgatacctattgaggggcaagatacttgtgatatttatgctgtgctgtatgagtctgaagggcttgaacaaggcacgttggatggggataatgtgttgaacagtaagaatatcgtggctttggctcgcttggaaaatcctgagatgcatgatccggaaacagatttggaaagagtggaatacaagtctttcgatttggactttaagtataagaagccattcaatgatgaaaaatccagacaatataaatataatctggctgtagtatttacttcgagtataagaggagcgacttttatcggagctgtcggaagtgtcttgtatgtagatgaagttcaggtggaatgtgaataatagaaattatagttatgaaaaggattgtagcaatcatcttgtttgttttagtcggtctgaatttacaggctgatgaggtgaaatcaaaaggtttgctttggtcggcatttaggggtcttgaatatcgtatcaaggcaggttttaattttggcggtacatctccgttgcctttgcctgtcgaaattcgaaaaattgaaggtttccgtccgggaacgcaaattgctatagaaggtaatgtaataaagtggttagatggtaataaaagatggggggctttggttggtgtccgtctggaaaataagggtatgaaaacggatgctcgtgtaaaaaattattttatggtgatggatgctacgagcggagagattaccggacatatggaaggcaattggaccggatatgtaaagacaaatgttaaaaattcgtatgtgacgattccgcttcaggcaattttcaaggcttcgcctcgttgggatgtaaaatttggtccctatatttcaattctgacgaacggtgatttttcaggaacggcgtatgacggttatttgcgggatggaagtccgataggtcctaaagtgcatgttgatgatgcaacttatgatttttcatccgatttgcgtaaattccagtggggactggatttaggaggagaatggcgggcttataagcacttgagcgtatatgctgatttgacttgggggttgaatgctattttcccggatgattttaaaagtattacgtttaaaatgtataatgtgtatctgaattttggattcggatatgtgttttaatgttttgggatgggggttattattcgtcagagtataaaagcgacagtctttaattatatcggagcctttataggttttctgactaccttttttattctgacgaagttcctgcaacccgaagttatcggtttgacaaaggtgatgtatgaggtggcggcgttggttgccggctttgcacaattgggtacctctgcctcagccatgcgtttctttccttatttccgtaatcagcaaaacgggcacaatggttttttcttttatctgatgttgatgccaacgattggttcggtactttttatcggtgttttcttgttgctgaaaaattggataattgatttttttatcgagaagtcggctttgttggttgattatttttattggttgctaccactcattattttcttgacttttggtgctgttattgagacttatgccaatattttgatgaagattgtcgtgcccaagtttatcaaggaaatcgggattcgggtgatgttgctggtcatttatttttgttatgcctgggggtggttgaatttgacaggcttggtaactggttttgtattggtgtatggtggtgccatgttggctaatatgtattatgtttctacaattacacctttgtcttttaggcatgataattcgtatattgataaaaatttgcgacgggatatcatgcgttataccttggtattgattattggagctatcggtgggaatataatgcctcagcttgatatttttatggtaagttcgaatatgggattgggatatgcagggatatatacgatagctatgtatatgggatctgtgatagaggtgccgagccgttctatttcggctatatcaaagccattggccgcaaacgcattaaaggatggagatttggagagagccaatcaattgtatcgacaggtggcattgcaccaattgatggcgagcagcacgctgtttttgttgatttggataaatattgataatattttcgatattctgcctaatggggaggtttatgagacgggcaaatgggtggtattttttattgctatggccaggattttagcaactacattggagtttggtggaaccttgatatctttttcaaagtattattattggggtttgtacattactttttttctgacaggtttgaccatttttaccaatagtgtgtttattccgcggtggggtatttcaggagcagccttggctacttttttgacttgtgtggtgagttatacttttcagcagtggattgtgctgcgtaaagtgaaagggaatccgtatagtatcggtattttgaagcaggtgttgcttgtgggggcgttatttggggtgaatgagttattgccgcgttggtgtgacaatccctttgttgatgggatatacagaactgcgttgattggcggttcttggatagtggcaacttatttttggcacacgtctgaaagtgtcaatgggttgataagcaaaataatccataagaattattgtaagcaagacaaccattgacggatgatattctcgatagagaattttgagcagtcagccaaggcatttatagccattttttcacgtgttttcgtatccttcattaaagcagataattgttctgtaaatgctatgttgttgccggctggtataataatgccgttgtgactatgagttatgatgtcatgtgcggcagcatacgtgtcaaaaacgatggggacaactcccatttgttgtgcttcggtaagcaccatgccaaagccttcataggcagaggtcagcatgcaaatggctgctcttttgtaataggggcgagggtcttgttgaccttcaaaatctacttgtttcagcttaagtttgtgtgccagatgatgataatacatttcatccggtccggtgccgataattttcaatcgccaatcaggaaattgctgtgaattttcaatatgttgccatatccgaagagcagtcgagaatcttttggctcgttctgacagacgacctacaagtatgacctccttggctttttgtgtaatttcttctgtaggcagattttcattgaatgaaagactgttgccgattcctgcaaaatgggataaatcaatatttgagatatttgccagttgttgaaaaataggaatataccttggtgatagcagtacgattttatcagaatgctgatagatataggtgtaatttttccgtactttggaacgtacaagggctttatagcaggcgggaggcaagagagctacggctgttttgaatagagcgtttatctttccgggccgatgtaataatcggtagaactcagaggagatggaaggacgtacaaattctttacctggagcgctatggttacaatagtatagtttgcaatcagatatatttgaaatggcttgtttgacaactttaagtttgattagtggcatacattcttgtacaatgatgcggttaatttcatgtttttgaataaatgcgcacagtttttgggaagattctgttgaatagtctaatttaaggatatcaacaaatagtccttttgaagcaggagtgtttttttcaaagtttgctccataacataaaaatccacgtgtagtaaatgcttgtgcgagcacataggtaattcgttgtatccctgagttcaaaggattaacctcgctgttgttgacaaatagaatattcatgatatggatttgatagattatagaaatagtgaatcaatcttttaataggtcgttgatgaagttttctttgcggcttaaagagttggggtcacaacctttccaattggagccgttgataatatgcagccattctgaatccagatattggatgtagtctgaatgatagtcggtgccttctcctaagggaatatttttccgctcgatatgatgcagtttgtctatatcgtattttttgtaaagaataggataatttgcgcctcctgtatctaaatattctccttgttcaatgtaaggaatgaaatttaaaggaaggttttcgacagctttaaagcgaaaaatagacagtccggcccacagataccagcctttagggcgttggttgatggccccataaaaatcttgtccgccaattaattgggatatagatattgtttttatgggaaataagtcgtgatcaagaaagccaaaaaatgtggggcgcctaagcttgatatagtttgtataaatccagtttagagaactgccatgtgcgtaacttccaccgggataatgttggagcatgttttgtggcatggagatatatccagcacctagttcacgacatatgttttttataatcttgcgtttgccggggatgttggaattgtctgctattgtaaaatggactggtttgtcttgaataaatttctttaataaaagcagttgttgtttgattaaatgttcattattgaaagctacggtaaccagatcaatgtgtcctgttttctggggagttgtgtcgcaattgagatggtctgtttgttccaggcgctttcttctcatgcaacggatacaagtgtttacatatatgagccataacttacgcttgagtcccatgttattctgttttttttattatgccaataatgtttgatggcaaaggtagtaagatttattatttttatatttgtgcggaattaatttgtgatatgaaattcattgcatattttatcggttatatagtgtgggcgttttctttgttaatgcctcgcagtaagaaaatatgggtatttggtagcttccgtggaacttttgcagataatgcaaagtatctttttattcatgtggcagaaaacagtaaaataatcaagcctgtttggatttcgtataaaacatctacggtaaagcaggtgagggatttggggctgaaggcttattctattttttctatacaggggctttattatgcgttgcggggaggttattattttttcaatgcctatagttcggatatttgttattttacatcaggacgggctgtacaggtcaatttatggcatggagtgggattgaaaaaaatagaattttgtatagatcggggaccgttatatgatcgttatgtacgaaagactttgaaagagcgtttttattatccacaggtgtatcatcgtccggattatttcctttcgtcgacgccttttcagtctgtaaaatttgcccaggcattccgaattgacgaacagcattgcctgaatatcggctatcccagaaatgatatattgttggcatcagaacaagagcgtcaggcatacttgaatcgttttgaatctgataagacgaaggggttgataggccggctgcaaagttataaacgggtatttttgtatatgccaacttggagagagtctcagcgcaagttgttcgccgaacatttaaatctggaagcgttgaacaagctgatgttacaaaaggacggattattggtgttgaagccgcatgccaacacgattgtagaaaatcgggaggtgatgtcacattattcaaatatccttttattggaaggaggagttgatatatatcctttgctggcttatacagatgtattgattactgattattcttctatattgtatgattatttgttgcttgacaataagggggtgattctttatctttatgactataaagagtatgttaaggatcgggattttaattatccgtttatggaaaatgttgttggagaagtggcttgtacatttgcagagcttgtcgcaataatagaacgcgatgagtatgatagaagtcgttatggattgatgcgtgaacgattttggggagaatataagggcagagcttgtcagtctattacagaaatgtttaaaaataagcagtgatatgcaaccttatttttcagtgattattccagtatacaacggcggaaagagacttgcggcaacgttggacagtgtgtgtaatcagacgttttatgattttgagataatcgtggttgatgatggaagtctggataatacttcagagattgttgccggttattgtgaaaaagacccacaaagggtgcattatttttataaagagaatggtggtgtgagttctgccagaaatgtgggaattggaaaagcagcgggtcgatttgtgacgttccttgatagcgatgattttttggatgaaaattatttgcaaaggatgtttgacgtattggatggaacagagaagggatgggcttgttgtattaataaagaaaatggaaggattaatttagcaagatttgcttataaagaagggggagtgtcattactcaagcatattttgggtggtggtactttgcctcagactgcctgttggacagtgaaaagggggttgttggaaaagtcgggtattgcttttgacgaaagtataagttatacagaggattataatttcttttgtaaatttctgtactatacagaaggaatggggattgaaggtatttatctgaaagaggttttggtagattatatcctgcattatggctctttgtgtcagcatgaaaaatggtggttggatttgaagcatctgaaggaggattttgagagtacgaagggaatctataactatgttgagagctcggatagagaggataaggctgtttatttaagtcttttgcggaggcgtttgaagaaaaaatatttatataatttatggggcaccttgttgcttggagagatgagagacttcaagcatttgaggcaaatgtatttagacgataaaagaacttattctttgtcggaggtggatttaggcatgaaatactgcatttgggagttggcaaccggtccggtaatatgctatatgactcttgtgttgcgtccttataaacgttttcagaaatccagacagcgaaaaaaaattctttaatagcagactcttttaggtatatgccatttttttgcctatttttgttacactttaccattaagacagaataatgaatatagctgtaatattggcgggtggcgtaggcagtcggttagatagcagtcatcccaagcaattttttaaagtagctggtaaaacagtcattgagcatacaatagaggtttttgaacgcaattcactcattgacgagattgctgtagtgattaatccggcatatttgacaaccattgaagagattgtgcttaaaaatggttggagaaaagttcgcaagatattaaaaggaggggctgaacgttatcactccagtatggcagcgatagaggcttatgccggatgtcaagatgtgaatttgatttttcacgatgccgtacgtccattgattacagacagaatcattcatgatacaatacaggcgctggatacttataatgccgttgatgtagcagttccggctgtagatacaatcatttctgtccatggtgattatattgatgctattcctgatagaagtaagttgcggagaggacagactcctcagggatttaaattggaaacaatacaagaggcttataaatgtgctttgttggatcctgactttaagtcaacggatgactgtggtgtggtcttgaagtatctgcctaatgagaagatatatgttgttagaggcgaagaatcgaatatgaagctgacctataaggaagattcttatctgttggacaaattatttcagttacattctttttcgctgcaggaacaagaagatgcttttaataagttgcaagataaggtattggttatctttggcggaagttatggtattggagcagaaatggcagcaatagcaaaaaaacatggggcaaaagtacattgcttctctcgttcattaaatggagtggatattgcttcgttggaagatgtcagaatgagtcttcaaaatgtggcagcagaagaacaaaggatcgattatgtcgtgaatactgcagctttgctcattcgcgagcctttaaataatatgacatatgctgatgtttgtaaagtgattaatgttaattatttgggaatggttaatgtcgcactggagagtttcccgtatttgaaatcatctaagggtacgttattattttatacctctagttcttatacgcggggaagggcgttttatagtctttattcctcaacaaaagcagctgttgttaattttgtacaagctatttcgcaagaatgggaatcgaatggagtacgagtaaattgtattaatccggagcggacaaaaacacctatgcgtgtcaggaattttggtatagaagatgatgcgactcttttaaaagcggaaacggtagcaattgaatcgttaaagacacttttatctgattttacaggacaagtgatagatgttaaattgaataaatagtaattttattaataaatcgatatgaatgcagtttcgataatttggacgaaaatacgtccgcatatatttgtctttcttttctttttggcaatttcattgatgttttttgctcctaaatttcagggaatgcagttaagacaaggagatactgaaaaatatatggagatgtctcaagaagcgagagcatattatgagaaagaaggagttgggacttcgtggacaggttctatgttttcaggaatgcctacttatgccattactacacagggtggacctgccaatctgctgaattatctggagaaaccgtttaaagatttgggaggttcggattgtggtgttgtatttttttctttagtatcttgttatgtattgatgttgttgctaggggcaaatattccagtggcaatattgggtgcaatagcgttttcattttcatcgtatagtttgattattctacaggcgggccacattactaaggcgtgggcaatggcttatatgccattggtttttgcaggttttgtattggttttgaggggtaaatatttgcttggtggttttatatttactttgtccttggcattacagataaagaataatcacccacagattacttattatctggctttgttttgctgtattgtatatctcggatatgttgtgaatcaaatccgttcgaaaagctggcgtttgattggtttttcattagcgacgttgattggtggagttctgttggcgtttctatgtaatatgggacctttgtatgcaaattacgaactttcaaaagagagtattcgtggacgttcagagctgactcatcaggttgatgggaaggctaataaatcaaatggtctggataaagattatgcttttgcttggagctatggtatcggtgaaacatttacttttttgatacctgatttttatggaggagcctccggaggaatcttggggaatgattcgcatgttgcaaaagaattatataaacagggctatcaagtgcctactccgttacagtcttatacatattggggagaccaaccatttacttccggaccggtttattttggagctattgtttgtatgctttttgtcctagggctttttactattaaacatccattaaaatggtggttgataggagggatggttgtttttatatttttaagttggggacgaaattttgatagtttcaatacgttgttattccattatttgcctttttacaataagttccgtactgtttcaatggcattagtcattcctcaattgatttttgctgtcattgctgtatgggggttgataatgctttttaaacggaaaaatgagaagcagcaactactgaaagcattatattatgctgtgggaattacaggaggtctctgtttattttttgctttctttgcaccaatggacttccgttcgtctttggattttcaatacggtatgccggattggtatatgaatgctttggctgaagaccgtgcagctttgttgagggcagatgcctatcgttcattgttgtttattgtgttaggtggtggttgtctttatctttatctttatattaaaaatgacaaaccgtctcgttatttgccttatatcttgtcgttattggtattgattgatttgtggggagttgataagcgttatctgaataagtctcattttataaaagcacatgcggcccagcagttatattctccgtctgtgtcagatcggatgataatgcaagataaagatccatcatatcgtgtcttgtctttgcaggatccttttaataatagtggaccatcttattttcataagagtatcggtggttatagcgctgcaaaattgcgtcgctatcaagacttgatagagatgaaattggccccggaaattgaattgttacagcggcagttggcaaaagcggcttctgtggaagaggcaaaagcagcattcaagacagttccaatattgaatatgcttaatatgcgatatttgataattgatcctaaccaggcacctttgaagaatccgtatgcttatggaaatgcttggtttgtgtcctctgtgaaggtcgtggataatgctgatgaagagatggtagctttgcaagcgaatgacccgcatgaagttgcgcttgtggataagcggttcgagactttggttagtagcaagaaatggacgttggattcgacggcaacagttaaattggtttcgtataagcccgatcgcttggaatataagtatacatcatctcaacccggaatgatgttgttttctgaagtatattatcctcatggatggaaggctatgatagatggacagcctgcggaacactttagggcaaattggattttaagaggtatggaggttcctgctggcgagcatacaatatccttttattttcatccggatgtttatatgaccggccggtggattggcactatttgttctggattgttggtgttgggcttgcttttagtcatcttctattatggaaagaagatggctaaaagtaaagagaacattggataaagtttatttaaataataaaccttgagtaacaaaccagcggaaatatagtaaaataccgcctttttgtggtttgcctcttaatatatagcttatgcaaaggatgaatgaggcaatccacttcattccttctaagagaatggttttgagatatgctaaccgtgaaatgtttaatgttctgatttgttcgcttagacctatacctttggcttgcttttgtatgaaatctaattttgtccgtctttcggggactaggtgatgtacaatagcggaaggaatgtatgctatgcgaaatcctgcattgatgatgcggaatgctatgtctttttcttcccctccgataagttgttgtttgattcttccgagtgatgtattaaataaaccacaagtattaaatatttctgtgcggtaggtcatattggaacctcgtggatattttttacttgggcggtttaaaatataaggttttaatgacggctggaagtatccgaaaagtgtgtttatgtaaggattttcccagcttggaatacttcccgtgtaacttaaaaatatgggaccaccgacttcagctatatcagtatgctcgtctaaatagttacaaaccgtttctagaaaatccggatttaacagagcatcatcatctgcaaatgttatatacttacccttggcttcttgtatacaacggttgcgtgcgaaagacaagccttgattgtattcgatgtggtattgtattttcagagagggatggtcagcgataaattgcttgcagatggcatctgtgttgtctgtactattattgttgacaaatataatttcgaattctcgaggagatagagtttgctgtaagatggaatccatcagacctttcaaaaatgaatctctattgtaggtgcttatggctacagagattttaaatgggtattggtaatctttaggttgattaggcatgtatatgtagttattttggtgacaattcatacaaaaatacgactttttattggaaatttgtgtgtctgatgttttttgtttgagagtatatgaatctgatataatttatttactatttttgattagaaattgaatttatatgaagatagtcattttaggtcctgcaaatccttatagaggtggtatcgcagctttgaatgaaaggctggcagtagagtttattagagaagggcatgaggttatggtttttaattttaaactccaatatccgggatttcttttcccgggtaaaactcaatatacagatgatcctgcccctgaaagtgtgaccatcttgccgcgtgtaaattctgtgaatcctttgaactggttgattgtaggtcgggagctaaaacgattgtctcctgacatgattattgtgcgttattggttaccttttatggggcctgctctaggatcaatctgtcgcattgctcgcaagaataagcatacaaaagtggtatgtattgcagataatatcatacctcatgaaaaacggcctggtgataggctctttacccattattttgttaagggtgtcgatggatttattgcgatgtctcgagaagtgtttcaagacattgatttgtttgtgaaacagcctataaaacgtttggctgcacatcctgtgtatgatcattatggcgctataatacctaaagaggaggctttaaagggattgagtttgtctccagattatcactacttgctattctttggctttattagagattataaaggtctggatttattgttagaggctatggcagacgttcgagtgcgtgaaaagccggttaaattgattgttgcaggtgagtattatggaaatcaagatagatacgagtctttgataaagcaacttcaattggatgaaaagttggtgttgaagactgattatattccgtctgatgaaattaataaatatttttgtgctgcagatttagttgtgcaaccttataaatctgcgacacagagtggtgtgacacaaataggttaccattttgacaagcctatgttggtgactgctgtaggaggattggctgagataattgctgacaaatgttctggttatgtggtcaaaccgacaagcgaagccattgcggatgctattgttgatttttatgaaaagaatagagagtcattctttgttgcagaaactagaaggctgaaaaagaatttttcttgggcgactttgacaggcaaaatttttgaaatatataatgaagtaaagtaatataagtaggtggtttgttgatttattagtagggttttattaaatatttaaaggctaaaaactggacaattttccatgtttttagcctttaagattattttatgcttgattctaatagaatctgtagcgttggtcttttacttctccgtttttcatgattgcttctatcgcttgatagtttgcacgatacatgtttacttgctgtaaagaagcttttgtctgcttaatttcgtcaggcgttacttcgtctgttgtgcggttgtttactaagataacaaacacgccttgatttccctcaatgggggcagataatttaccttgttctgctactgaagctgctgctattacgcgaggttcaattcctgctcctggaatttggaatgaattaaagcttatttcagttgcttcttttacatcaacacctgctttttgtgcaacagatagcaaactctcgcttccgctcatcatgctagcaagctctttctttaagatttctgcttttttcttttgaatcaaaatacgtttgattgtagaggctacattgttgataggtgcgatgccttcttcattgacttctgtcaatatagcaacagtatatttattgccatttgtaaagatgatagactcgtctttagtttgaacaagtcccggttcttctgtcaaatatatctgacggatcatttcacgggcattgtccattcctgctatggttttatcgtttttgcctacagttgcaattcgtttcgttaaaccggtttcttcaacttttttatcaaagcttgttgcatccttaatgcctgttgcaaaattgcgggcatcgttgtaaatcttatttgtagtcttgccagaagcattgatttctttttcaatagttgctatctgaattttttgtactggttttgccatgtcagtaacctgtacaacatgagcaccaaattgagtcaataccactttaatgtcatttttctttgcgaagaatactgagtcgctgaatggttgaaccatcattttctggttgaaccaacctaaatctcctccgttgatagcagaattttggtctgctgagtttttaagagccagttcttcaaaatctgcaccctttctaagtaaatttgctaaactatctgcagtagcttttgcttgcatgtagttgttgttttgcggagcaattaaaatgtggcgggctcgaacagaatcaggtaacattttaacatctcctactcgtgaaattttatatgcattgttttccaagtacggaccaaatacctctgagttgttggcgaataagaagtttgccaaactgtcattggcgatttcttctttcttgtagtaatttacatcagctttaacatcagaagataaatttacaaattccattggttcattgcttgctgcgaattctccaattagttcttcgacacttttttctgtttctgcgaaatcatctcctgacggttcaatatcaaagttcacataaacaattcttcttgattcattctgtttgaatctagcttggttgttgttatagtattctttgatttcattattactgatattgatgctggaatcatcaattgagctatagttttttacaatatagctgatatctgtttttgttgcattaccttctgcatttgctttggcctgctcgtcggtaacgtacatccccttagctaacaaattgccgtatttgcttaacaggcgggtatcatgggtttcgcgctccatatttagccaatagtttttttggttaagcatggcaccgtactcaggcgagttaggattcagcggagtctcaagaatttgttttacaatcatgcgtgcacgctctttatcgacaacacctgttttgggatctgcgaacaattggtgcatggcaggagtcatattatcacctaataaaacatcatataactcttcgccattaacggttaatcctaattcctcatattctctacccatgagtttttccataatcatttgttgccaaatgttgttgcggagcatcgtttgttggtcttcatttaatgctgtaatgccattcattgccttcagcatttcttcttgctgggtaactttgttttgataatcagtgatagatatcccttcacctgcgatttctcccacttgattgcgttcgctattaaacatgctagaacctgaacttaaagcgtctccaacgataaaagctactaaggctagaccgattacaatgctgactaacagtcctccacggtctctgattgtttgtaatgctgccatttataaattatttaatgttttttacaaatatctcttttcgagggtacgaagatagataaaagtgcgctgttctgcaaataattaaattgattattcacggatttatttatctgtttttgtactcgatgtggatttttttgtttttgttttagttgttgtctttgttttagtcgtttcagaggtctttttgctggatactttgttttttttatccccctccttttcaataagttccatgcatttttccaacgttaattcttcagcttttaaagctttgggaattttatagttggctttgttgtatgcgatataaggtccaaagcgtccgttcaatacctttactccattatcaaattcatgtatcagtttgttgcggtcgctttctcttttctcttcgatgcgtgctatggctgtttccagtgttattgtacccggatcatcaacgccttttttgagagaaacgaatacgttgttgtgctttatataggggccaaaacgtcctattccaatgctgacctccttgtcttcatattgtcctattttccgagggaacttgaataaagcaagggcttcttcaagggtgatagtttccattagctgcccttttaacagcccggcatatctgacagtatcgccttctcctatttgtgccatgggaccgaatctgccgatacgtacactgaccgtttctccggttgtcggttctgttcctaatattctttgtccactgttccgctctgagtttttgagagtcgtttctaccgtttcatggaagggtgtatagaactcgcctatcattttttgccattggacagaaccctctgcaacatggtccagagcttcttctgcctctgcagtaaagttatagtccatgatatttttgaagtgttgtgagaggaagtctgttaccaccatacccatgtctgatgggaacagctttttcttttctgttccaaaactcttcttttgttttttgtttttaatgctattgtcgcaaagttctatgacttcaacgtttttctcaacaccttcgcgggattctctgatgatatatccccggttctgaatggttgtgatagttggggcataagttgacggacggccgattcccaatgcctccatttttttcaccagactagcttccgtgtatctgggaggatgttgtgtgtattgttcttgtgctgttataactgtgtatgtcagttggtctcccttgcttatcggtggtagcagtgcactatgttcgtcctcggtctcatcatcgtgagattccatatacacttttaaaaatccgtcgaatttaattacttcgcccgtggctgtaaatggaatcttgtgattagaaagttcaagaatgatgtttgttctctctaattcagcatctgccatttgagatgcaatagtccgtttatatatcaggtcgtatagctgttgctcatttttgtctccttctatttccggacggttcatgtaggtagggcgaattgcttcgtgcgcttcttgggcccccttcgttttagtcgcataattgcgagatttcgaatatttttctcccatggtttcacaaatgacagcctttgctgtacggatggccaaatcagaaagattgaccgagtcggtacgcatataggtgataagtccatgttcatatagcttttgtgctacggacatggtttgtgacacagagaagcctaatttacgagatgcctcttgctgtagagttgatgtcgtaaatggaggagccggttttttaaaggtcggttttgtgtctacatttttaacagtaaacactgagtttttgcatgcttctaaatattctatagtggcttcacgggtattgaagcgttcttgtgcttctgcatgtaagactgcgtggtctgaggtagcaaaattaccggttaccctatagtattgttgctctttaaagttgtttatctctcgttctctttcgacaatcagttttacagcgacagattgcactcgtcctgctgacaatgatggttttacttttttccaaagcacaggagatacttcaaaacctacaagtctgtctaaaactcgtctggcttgttgtgcatctacaagatttttgtcaatattacgtggatgttggatggcatacaagatagcatctttcgtaatttcatgaaagacaattcgccttgtgttttctggtttcagctttaatacttcaaatagatgccaggcaatggcttctccttcgcggtcctcatcggatgctagccatacgattttagcctctttggaaagagcctttaaatctttcacaatagccttcttatcggcagatatttcatacttgggttgaaactcatgttcaatatcaactcctaaatcttttttctccaagtcgcggatatgtccaaaacttgattttaccgtatatccgtcacctaaaaatttctctatagttttagctttcgcaggagactctactattaccaggttctcaatcatatattataatgctcaggcatatcacatgccaaagttaatagtttaaaatcatggtgcaaacctacgaaaaaaagttacaactaaaaaacttcagaaaaaaaaccatctaaaaggagtatttttaggtattcagtgcttctcagttgattctttcgatttgtctgatgaaaagaatttccggtaaaacaataagagcatcagtactccgatggtgatgtatgaatctgctaagttaaagacggggcggaaaaatataaagtcttgtcctccccagatgggaacccacgaagggaactgtccttctattagcgggaaatatagcatatcaactactttgccatgcagaaatgaggagtatccaccgtcttgcggaaataatgtagctatttggaaatgactgtcattaaagattattccgtagaataaactgtcaattatattaccgattgctccacagaaaatgagtgtgaaagaataaagaacccctgccggagctttttctcgtattaatttcatgatataccaaccgatagcacctacagcagcgattcggaacaggctgagaatcattttgcctattttcccatcacttagttccataccaaatgccataccgttgttttctacaaataggattttaaaccaatctccgaatacggaaatctcttctcctatcatcatgtgggttttaatccagatttttacagcctgatcaacaataagaagtatggctgtgaatattaacagtttgttgcgtagaatcatgaaattggatattgaagaagaaaattggaaatggctagccattcccaattttcaatttttgttagccctgtccgttttctttagcctcaatgcttaatgttgcatgagggacagcgcgtagacgttctttagaaatcaatttgcctgtaacccgacaaatgccataggttttgttctcaatgcgaatgagagcggcttctagatgggcaataaatttagcttgccgttgagcgagacgcccagcttcttctttggaaaggacagaagcaccttcttcgagcactttaaacgttggactagtgtcagcaatgtcattgccgtcactgcctgagagcgaggctttaaggatttcgtagtccttgcgagccttgtctagtttttcaagaatcaattctttgaattcctgcaactcttcatcggagtatctagttttttctgccatagctttaaagttttgcctaaaaataataactttttttcaatgcactacggtttacttgaaataatgttggcaaattgttataatttttcgattttgatgaatgtttgtatttcgtcaatctctatatctttcgccttatcgtcgcgattgtcagtgagttctacgctttctgccaatacttgacttgcaatgtaggccttgaaatgttctacagcttcattgatttcatcgtgacggccgattgccagagtgattttatctgtaacatcaaaattgctctctttacgaagattctggatgcggttgataagttcacgggcaataccttcttcttttaattctttcgttacgttgatatctaaagctacagtcagacgtccctcatttgctaccagccaacccggaatgtcctcagaaagtatttctacgtcctccagtgtcagggtaatggtttcatctccgatagccaggttatatttgccttccttctccaaattgaaaatatcgctttgttccattttgccgaccaatgcggaaatctgtttcatatattttccgtatttggggcctagtgtcttgaagttcggctttatacgttttactagtacacctgttgtatctgtgatgtattctatttcttttacgtttacctctgataagatgatgtttttaacagcatccaactgaggaatcatttcatcgttcaagataggaataatcaatttgctcaacggctggcgtacgcgtagttgcactttgcggcgtaatcccaataccatggatgatatcttttgtgccaattccatgcgttcttccaatgcactgtcaataagtgcttcattcgctttagggaatgttgtcaggtgcacactgccattataacgtccggttacgctattcaagtcgttgaatagtttttccatgtagaacggagcgataggagccgatagtattgcaactgtttccaagcaagtgtaaagcgtctgataggctgatatcttgtcttgagaatattctccgccccaatatcttttgcgggataggcgtacataccagttggataggttctcaatgacaaattcctgaatggcgcgtcctgcccgggtcggttcgtatttttcatatgcttctgtcacttcttttaccagcgaattcaacaaggagagaatccagcggtcgatttccggacgttctgaaaccggtatgtcggcttctgaatagcggaagttgtctacattggcatacaatgcgaagaaaccgtatgtgttatataaagtaccgaagaatttacgtttcacttcatccactccggctacatcaaactttaagttgtcccatggctgagaatttgttatcatgtaccaacgcaatgggtcggaaccatgttctgcgattgtggtaaatggatctacagcattaccgaggcgtttggacatcttgttgcctttggcatccaataccaatccgttggaaatgatgtttttaaatgcaacagagtcaaatgccatcgtagcaattgcatgtagcgtgaagaaccaaccgcgggtctggtccactccttctgcaatgaaatctgccgggaaacggagatgtttgtcaatgtcatccttgtgttcaaaaggatagtgaagctgtgcatagggcattgcgccagaatcgaaccatacatcaatcaagtctttctcacggaacattttctgaccgttggaagagacaaggatgatgtcatccacataaggacgatgtaagtctatttttgcatagttgtcttttgaattgtccccaacaacgaatccttcgtaaggattttttatcatgaatcctgctgcaatggatttttctatttcttccattaattctgcaacagaaccgatacacttctgctcagaaccatcttcgctaatccagataggaagtggagttccccagtaacgtgagcgcgataagttccagtctacaagattttcaagccatttaccgaagcgaccttcacctgtgctggctggtttccaattgatggtgcggttcagttccatcatacgctcgcgtacggcagtcgttttgataaaccaagaatccaacggatagtagagcactggtttgtctgtacgccagcagtgtggatagttgtgttcgtgtttctcgactttaaatgctttgttttcttttttcagcatgacagacaagtcaatatccaatgtcggatcctcgtcagtcagagtcgggtcgtaagcatttttcacaaagcggccggcatattcgctgtataattcgacatttacattgttctttacaaactctgggtcgatttcatccaaaatgaacaggcgtccacgtttgtctaccatcggttgtttgttgccgtctttatcaaccaataacataggtgctattccggcagctttagcaacgcggtcatcgtccgcaccgaatgttggtgcaatgtgtacaataccggtaccatcttccgtggttacgtaatctcctaggataacacggaatgcatctccttccggacgcatccagggcatcagttgttcgtagcggataccttccaattccgggcccttgaattctgccaccttctgataggggataagtttatctcctgctttataatcttccaaagcaatgtctgccgctttgggattaaaataagcagcaaaacgatccttggcaagaatgactgtcaccggaagataggtatatggattgtatgtttttactacatagtaagtgatgttcggtcccacagccagtgctgtattggatggtaatgtccagggggtggttgtccaggccaagaaatgtacggtatcgctgtatgcaaacagtttttccgacttctcatcacgaaccaccttgaattgagccacacaggttgtatccttaacgtcacggtaacatcccggctggttcaactcatgtgtgcttaaaccggttccggcagcaggtgaatagggctgaatagtatatcctttataaagaaatcctttgtcgtatagttttttcaaaagataccacaaagtctcaatgtaacgattgtcgtatgtgatataaggattgtgcatatccacccaatatcccatctgtttggtcagatcttcccattcttttgtgaatttcatcacatcaaggcgacactctttattgtagtcggcaacactgatacttttgccgatggcttcctttgtaatgccgagttttttttctacccctaattcaacaggtaaaccatgagtatcccatccggccttgcgttcaactaaaaatccctgaagagtcttgtagcggcaaatgacatctttaatggttcttgccatggcatggtgaatgccgggcattccgtttgctgaaggaggaccttcaaaaaagacaaacgaagggtgaccttcccgtgtcttcaaactcatttcgaaagtatggttgtcttcccaagttttcagtacttctttgttcacttgagaaagattcaaacctttgtattcaggaaatttctcgttcatttatgtagtttttaaatggttcttaatgaattgggtgcaaagatactatttttaattttcatcggcaacaacaaagcgggctgtcagacggctgcgttgttctaccaatatgtttttgtttgcagtaagtcttgctataacatcttcattataatgacggatagtcagcagacgtacatttgtattgtataagacttcgtattcgtcgtgcaattcgttgatgaaactttcaaaaatagcttcattcaggtcaatacagaaagagaatgtgatagccgaggtttgcatcaggttcaaacgtaaccggtatttggctaggattgcgaaaatgcggctaagcttttcttctgcaataaacgaaaagtcgcggggggagagcgtcagcaacaactgattccctttgtcaataaaaataggggggagattcaggcgttcgtctaattcccgtatcacggagccgtggctttccgggtagaggaatgaacgcacatagagaggaattcccttgttttgcagaggcttgatggtcttggggtggataactttagctccacagtttgaaagttctatcgcctctttatacgacattttgctgatgatttccgtatctttataaagtttggggtcagcattcatgattcccggaacatctttccagatagtaaccgactcggcatccagtaagtttgccaataacgctgccgtatagtctgatccttctcgtccgagcgtcgttgtctggttggttgtcgtgcctgcaatgaaaccttgtgtaatatacatgaatgtgtcttggaacgtgaacgtttttcggcacaattgagaggaaagctctaaattgacacaggcattccgatagttttggtcggtaatcaggcatttacggatatcaatgaatttagctttccgtccttgtttctccatataggcagaaataatggtagtggaaagtagctctccaaaacagatgatgcggtcatactcataatcatacgacagagacgggtcgctatctaaaatgttttgtaattcgcaatataggttgtcagtcagacgagtcacttcgtctgctgaggtcccgaacaaatcattgatgatgttttggtgaaaatctttaatgcgcagaaaagcggatgcggtatcaccggttttgtgaaagtacgcattgcataacacttccaaggcatcggtcattttgcccatcgccgatacgacaataatcagattctctttttgagtgttgataatcttgaacaggtttttcactccatcggcatcttttacggatgcaccgccaaatttatatacgttcatatttcgaaatattataaacacttttattttaggccgctaatttataattaaattggatattttcatcataattcttttgaatacattttttgcagccggttttataagtgagaaaattattatctttatatgaaataataagtaatcattataaataaccgcaatatggaaactaccgtaaaaaaaatgtatgcccctgacgagttggtttgtgcggtggctatacatccaggagaaatgcttagggatgaattgcaggcacgtggaatatcgcaaaggaaatttgccggaataataggaatgccttatacagacttcaacgagataattaacgggaaacgtttgataacgacagatacagcattgaaaatcgaggctgctacaggaatatctgcaaccatgtggcttggtttgcaagctgattataatatgcatacggctcggagtgatcgtaaactttctgacattttggagaatatacgtaaagctgttgcaattctttgaaaggtaatttcgtatatatatagcgagaaaacgaaaaaagaattggttctaaaaaataaatcaacttttttgcggatttaagggagaatacctatctttgcaaagtaaacgaccaatatcgaattgaatttaccgtgatagaagaagaaagcgaaacgattgtttgcatctgtaatatattggaattgtcaaatcattataaataaaacaattatgattacagttaaaggaatagaccctaaaatgatagcaaataatcttgaaccgtttgaacccacgcatccgggcgatttgctcaaagatgaaatcgaatgtcgaggcatatctcaaaaacaacttgccgccgatatgggggtttcatataccgttttgaatgacattgtaagggggaaacgagctgtgaataccaagtttgctttgctttgtgaacaagcactggacattccagcacacttgttgttgaatctgcaagccgaatatgatatgattaccgctaaacgggataagtcttttttggaacgccttgccaacgtaaggaagattgcggcggtactttaataaaattcaatcggatatgaagaagtttatttttacttgtattatgcgaatcagcagttggctttctgattcaagatttaaaaattaacaaatgtaagtagagtaatggccaactttccaaaggtatgtaccaatacccttttgaggttatctccgtagctactttccccacccgttttttcttttacaggttacaatcggcatggaatcataattagaaaaatgcgtggttttattgttctaatttaccgatcttcaaggagattacaaaataaaataatgagataattaactgaattacaaaattttaaccaaggattagaagtgattttcaactactgattcgcattaattatgtgatatagctattcatagtatgatattgtttttctgtagttaacggaaaaaggggacttacgccccctttaaatgatataaaaaaatcatagactccgttatgaacacacaacattaacgcaataaagaagaaagcttctcagatgtttgcggatccgaaggacgtgtcattttagaatcaattatttttccctctttatctattaaaataaaacggggaatcaatgtgattttataatctgttcgaaatgaatccttgttggtcactcgcaattgtattccgtccaatttgtcattttccaccttatttctccacgccttctcatcggcatcaatcgatatgctgacaaattgtatggccttgtctttaaattggttcttcaattcatgaaatttggggagttcttggcaacaaggaccacaccaggtagcccacacatcaatgtagacataattgcccagaaaatcagataaattcacctgttttccgtttatatcgagtaaagaaaaagcaggagcttttttgcctggttccaaagagacatattgcgaataagatttatggaatttatttttcaacttctcattatcaaccattctgtcatagactggcaggaactcgtctacgccttccactccgtaatattttatgtagctagaaagacaatcatctgccagatattccctcatttttttgttgcagatatttttgtcgatatattcaacctcacatcttaatttatccaaagactttccggtttctcccatttttctatcccctaatagatgcatataggttcttaatacctgatagtattcaacaaattctccggctgtcgtatcttctttgattcgttctgcaagttttttataaaaagcctcacttggggcaaatccgttcaatttcagtcgtcttgagtgctgaaacggataatccaacagcatattgcatcctacataatacagacgcttggattccttctttttgaaatccgaaggtagctcctgtttagcaagattcttttgtaaccgtttaggtagttgctgccattcctttatgaattctttttcttccttttcataacctaagttcaaacaagataaaaaaggactgttcagataatcattgatatcttttgcctctccagcaaagttgatgttttgtcctaaaagcttggttacgtcttgtttcttgcctggaatcagataaaacatatgtacacttcttggaccgtaaacagttgcatatccagcctccaaatcattgggtacggtgatgattcccgctccggaagcatctagttttgttcgataagattctccggcaaattttaaaatgatctcttctgtttgaaatttatcatcaaagtgaaaagtcacttgagaaaaagcttgtgccccccacaacaggcagagggacacaaagctcattactaacaatctacgcataatcactaaataaatttaggataattccaattcatgtccagaatctcaccaaagccaccaaatactttttctgaagaaaggtctacggcaccattggttacgttgatataatacatatacacttttccctctttggtgctttcattataggtagacagcaacatgattttattattgtatggatggtttgggaaataacggtctacgaaaatagtcaatatctgcattccggtaatcttttcatccgatttttgtagagtataaagtttttcttcattttttgaaccattgtaatcaaaacggtacacatttcggtcgtctgcatacataaaaagaggtcctaagtcacccattgcataaaatttggcattcttcaaattggggcaattggatgccggatatttggctacggcaatgttgggttttgtatcaaaattaaattcatataaagccaattcatgtgaatcccaatcttcgaacaatccgaattcatgtttcccatatccggtatccatatagcgcaatgtagcatgcatattgttccaatcaaatacttgtgcttctgtcggtgctgccaattcttttaatatgtatgtatttttttctatacctaaaaaacgtccagcgagttcgtcataaagaattccttgataatagtcgaaccatttcggagcgtaaggagaggccttgtaggtcaaaccatcttttaagatgggttctgtgtagcttgtgaagtcttttccgatgcagctatatatataaaagcgaccgcctgaaataagagcatcatagccgaatcgcccgggactccaatagtaattccagtataggtaattttccggcttccagtcttccatttgtgggaataaggttgctatgtcatagcttttttccattgtataggccgataaacgagctcctcctttgtctgttaaaaccattatatcctgatagcgtccaatggaaaagaaggcgtcaatcgatactcctctcccttccaaaggttctccatttactgttttatatacattatgcaggatttcgtcctgctgtacccgctgcgaaaaataagggctcatcaccaaatcaaaatcgctcttcccgtctttttcatgcagtaccattagcccttcagttatgttgctctgtattaataaaagaatcgatttataactgcttacttccgtagctttgtttgttacagtcaaaactaaagtgtatgagccggcaatttcttccacgttataggataatttgcgctcattcccgatttcttttttgtgattcatgccatcaatggtattggaccacaaacgccaattgaatgtatagtcctcttctgaagccccttcaaataaaatgtctgcatccaattccaaggtcctgaattgggtggcgtatacggtatcctgcatgctgattgccaccttgtccagttcggtgtaatcataattccccttgtcatcatagcaggaagctaatacccaaacaagaggtacggtaaaaagtatatttataatcttgttcatcatataattctttaaggttacatatcatttaaaatgtcacaggtaagccgttctcgtctttcaagggattgcccggattttccttgttgtattcatacaaagcctgatttaactggctggtatagcgaatccggtctgacgtactccatttgtcatagtcggtggcaatgcctgtcaccttaattacgaactgatgttttatacggctgtattcgccgaaaggccagccggtcggttccaccaatacattgttcatcacgattctgtaggtgtctccgttgatgggtgccgctgcaaaattttcattgccgcacaagcgtaaggcaatatacagactgttgttatccaatttagcggttttctttacctttacctgcagtgagccgacaatggaatctgccggcagttcgttgctgatgatttcaaaatcttctccctcctgagccgttgttttgtctgaaacaacttcaactcctgctgtccggttttgtgatattgccataccgattaatttgaacggtatttttattattccctcatcttcgtcaggatgcagggcaaaagaatagacgatactatcattccctgcagcaggatattcaaatctcaacgaagcatagtctgtttcatattttacatagctgtctttttcacagctacccaagaaagccgtcatcaacaccaataatgacaggcagccgatatgtataaaacttttcatagtctctttataattaatttctatttccatattccaattcctgatcaggcatcggaagtacataaaatcctttactgaaaggtacggttagattgggcagcatttcccggtctgtccgcttgcaatagaagaaccactgtccttctccgataaactcttttcggtattctttcccgatgatggtttgcagtttttcggctgttataccctcttcccgaatgtcatctccttcttcgaatcccctatgatgacgtaattcgtttacatactttaaggcatcgttggtgttgtcggcacactcggctgctatcaaatacatttcgctgatgcgcaataacggttgtctcttgttgtatgtagatgacacctgccacaatttggagctgatataataggtgttataaggttcaaaataatagatgtatctccaatcagatcctccgtataaattactttcgaatatttcatttcgcacttctgttgaagttaccagtaagtttccttcgttatctttgctttctttcagatagacatccaccaatgagcccagtttgttgttgttcaacatccagatacattccggcataaagattccgtcccggctgttgcggtcggaagtcgctacagaaccacttgacacccaaggatattttttggaatctattacctcttgggcatatttcaatgcattggttttgtcgttcttgtacatgcagatacgtgccatcaaagctcgtacggcatagtagttcaagtggaattctcgcgtgcctataaaggctgtggttgctgttcctgttttttctggagactgttccaacagtgatgctgctttttccaaatcttgtaaagccaattctatcacttcagccaccgttgacaacggagttacttccttggaaattttcttcacataaggaatggctttttcctgtgctccgcttacaaaacttttgccgaacagacgaagcaaatcaaaatgcatgaatgcacgcaaggcataagcctcgccctcataaattttctcctctgcttctgtcaatacaccgcgatgctcttcgataccctgcaacagtatatttacgttggctattgtgttatacattttttcccacaccttgttaatcaccttttcactggattcttccttatattcaaagcggtgaaggtgataatagttgcctgttgcttgtgtccaggtatattgctgtcccaaggcatccatcattccaaaagtaagatgtgctccataaagctcctctgcacataaattcgtatatattccggtcagctggtctttaaagccattcttatagctgaacaggtcatcatattttacctctgtttcagggctgacatccagccatttttcacatgaaacactcagcaatgcgatgcataaaatgccgagcagattctttattttttgtattcttgtcatctgaatctatcttttagaatgttgcttgtaatgaaaatgaaaaagtacgtgcaaacggataagtcaatccgcgttctgtcttcacagtagaggcacggaatacatcatccatatagaaactggccttcagctgtttgatgacgctgttttccatgaaggcacaatggcgaaaatcgtagccgacattcaaggaagacattcttaactcgttcaaatcttgcacaaagcgagagcttggttttgttagactaaaacgattataggcaaaatcaaccacatctcccggtttcttccatactgaattataaattcgtttatccacgttcatggtaatgtccgcattttctactcggtctaccaaggtctggttgtatgtctgtcctccaaactgataatagaaagacaggttcatgaaaataccgcgataatccatattcactccgaatgtgccggaacattttggcatcgcatctccgcataccacttggtcttccgttctatattctgtcgttgtctttccgtctttggtcaggtaaagttcttgtcctgtggcaggatcgattcctaaagaccgtacagcccaaatggcattcatggattgtccctcaataaaacgggtctgtggtttgttggattttccgtctgcaatatctttgtccacttcgtcattgtagcttctcaatgcattggatatctctttcagtttgttggtattcttggcgatagaaaaagaggtgctcaaataacggtcgttatcgacatcatacagtagatgggcatttaattttagctccatacccttattttctgtacttccgatattctccatgtagctggtgaaacccatggatggtggcacggtcagagccagcaactgatcttttgttttttggatatagtagtcataggaaatcatcaggcggccaaacagattcaagtcgaatccgacattgaaatcctgggttttctgccacttcaggttgtcgtttggtagagcctgtaaataagaaccgatccaattgtcgtatgccagcccctggtggtagccgaacatggccaatgcttggtaaggattgaagttctgggctcctgtataaccggtggatgctcgcaatttcaattgtttcaaccattctgcattctccataaaatgctcattatggaggttccagccgatacctgccgaccagaattgtccccagcgtttgtctttaccgaagcgggaggaggcactggcacgccatgacaaatctgccagatagcggtcatcgaatgaatagttcaatgctcctatgattccgatctcacggctgatattcgcactgcccacaggagggaaatcatctttattgaagcccaatccggatgtgatgaagctgattttatcgttcgggaaaccgaccatggtgaaggttacatcctctgaacggttttgttccatattatagtttacattcaggaatatctggtgtttgtccagtatgagcgaataattggctgtgatatccatatcgatgctgctgctttctccttcctgtttaccatacgtacctttttcaaagaatttatcttccgaatatttcaagaatgcggtatgtgcagccggataaaaatcctcgcgtgaacttaaatttttagaaagacccaaacgaccgacaaatttcaaggattccaaagcctgccattcgatatagaagttattggtcaggctggtatatttgctgaagtttttagtaccaatagaagcattccacaaaggatttcctctgttttcagctttataacctccaccaccggtagtgcctgcaatctgtttcaaatcgccgttttcgtcatacggagtccaataaggattcatggcagcatactctgaaaaggctccataaggagaatcatcggcacggttcaggcttgtgctgaactgatttctgaatagcaggtctttgtaacggtatgaaagcgtaaagcctccggtaaaagtctggcgatcggaacctttcatcacaccctttacatcattatatagtaaatctactccatagcgcagacgctcgtcccctccttccatatatagtgaatgtctgtgaccaactccggtacgcaagggctgtgccagccagtcggtgtttatgccacgttctatattcgccttgatatcattcaaatattgttcctgaaaccatgaatcatagttgtctccgtgtgctttttcaacttcatatttttcttgggcattacataagttgtaacctgtcaaatccggaactgtcagattaatgtctcccttgtaggaaattctcagtttcccggctttcggttgatgtgtctctatgacaaccactccgttggcagctttggcaccatagattgctttggcagcagcatctttcagtaatacaatggtttctacacgattcatatccaagtcatatacggtggtgatatctgtttcgaaaccatccaaaataaacagcggctggttgggatttcccttataggttcctttgatgtccggcatggactgttgtccgcgcatctgaatctgaggtgctttattggggtctgagccgaaatcattgttctcaacgatatggaaggctgggtccaaactcttcaaagactgaagaatgttctgattacccattttctgcagatcctctttttttacagtagttgcagaaccggtaaaactctctttcttacgggtaaagataccggttactaccacttgctccatttctgtggcttctgcttccaatactactttcaagtctttttgtcctgcataagccacctcttttgttcgcataccgataaatgagaataccaatacgaccttgcttcctgaagccaaagtcagtttgaattttccatccatatccgttgcacagccaagggaggttcctttgacaattacagtaactcccggcaatggagctcctgattcatctacaacgacaccgctcacggattgtggctctgtctgttgtgcggcttctttttttatcacatacacaccatctgctttagaaaaaacaaaccctgttccctctaaaattttacccaagacaacctctaccggttgctttacaagatttacatctttgcaaatctgattcccaatcaattgcttgttgaacaagatgtcaatacctgcctggtctttgaatcttatcaacacatcattcaaactctcagactttgcagtaaatgtcactaaggttgcctgattatccactgatgcatacgtcagggaaagggcaaacaagaagtgtactactaacaacattttttttaaaaacacagcttttaaaagcctgtcaggagtcttttttttcatacatttgttttattaattcattaatattgatgattgactggagaatgggttcttagtttgccgaccacagaatccgttctccgttttattttcttccaacactcacaatacgtttgtctatcaggaattttatatttgcactctcttcaaaaaaacgcaataacgtagtaatctcgctatatctgcttatattgccggaaaactccagctttttcaaattcggatcagcaaaaacaatttctacatcataccatcgttccaaatctttggcgatagcttccagtgacatgttttcaaagcaaaagcgtttgtatttccaagcaacttcattgctgaccttgacccgttcaatctgaggatgagcttctccttctgttaatgtcagttgatagccgggctttaattttatttcggtaatccggctgttgctgaatccgatagaaccttctaccagtgtggtctttagttgtttgtcggacatgtagttccttacattgaactctgtgccataaacctgtacatcccccatgtcggtttctacaataaaaggcttggcggcatctttggttacatcaaaataagcttcacctgacagaaaaactcttcgttcatttccggtaaaagcaatcggagtttttaattttgtgtctgcattcagccatacttttgtcccgtcggacagctctacctgatactctccgcctttaggaattataattgtgttataggcggaatctttacctgcaactgcattgtatttgagaattccggaatctttttcgaccgacaattcctttatactaaactgcaatgaatcagccaatgcttctatatttactttttcaccgtttgacaggaggacaatagctttgctgtatcctgcaacaatcggctgtaccacctctgcataaggctgaaaatctgtctgtcttttttgccagagcaagatgcttcctcctacggccatcaatacaatcaggcaggctgcaatgcggtaaatgattcgctttatattctttttgttcctgttttcgtgcatgatgcgtcggtcaaaatctgcaattaattttgacacatccgttgttaaggtatccgttgtctcatctgcactccagactttacgcatccgctcgtaatattcttggtggcttgcgtcctctgccagccagctccggaaacggacttcttcttccgtagtcagagagcgacggacttttttcaacaaaatctcccaactgataaactcttcttccataaatatcttgatgctttccgataatttacattgatgggtaaaatggaggacatgatttctcaaaaaaaattatctttgtccaagcattatgaaagaaatcggtcaatttcaatccatagatagcctgggtctcaaaatcaagaacagagacctagaggcttttcatgaactttataatacctgctttgtgcctttacagcactatgctatgcgttatttgtatgattggaaagaggctgaagatatggtgcaggatgcttttctttctctttgggcaaacacggacaggtatgatgccagacaatccatatttaattatatgacggggattatcagaaacaattgtttgctgtatttacgcaatttgaagatacaggacaagcatcaggacaagttgattgaaactatattgttttcaaatgttgaagaaccggatattgatgaagatatgcataaacggttgcagcaagttctggaacttcttccggacaagcaacgggaagtggtcatgcagcatattgttgaaaagaaaaaaataaaagatattgccaaacaaatggatgttgcagaaacaacggtaaaaacccatttcaaacgggccatgactatattgaggaataaccttaagtttattttgtttgcagtataattcctctatccctgccagattcatctcctatagaaacctatggtaattatatgataaaaatatatcaaagataacaatctgttatctttgtcttatagttgtgttatatttgatatatgtttgagatgaatttaagtgggagggaggagggggtaatgagggagtggagaagttctgacacactaaataatatgaaaacgtttgtgtattacaatttctcattttatatttgcgtctactaacaaaaacattctgatttcatgaataaagttacaactttaaatcaatttattattgagcagcaggctaatgtacctgaggcgaccggtggtttttcttgtttgttgcaccatgtgggaattgctgcaaagaaaattaatagggaagtaaataaagccggattggtagatattctgggacgtgctggctcagaaaacgtacagggcgaagaccagcagaagttggatgtatatgccaatgaaacatttattgcagagttgaaggcgagcggtgaatgttgtggtattgcttcggaggaaaaccaggatgtggttgtttttgaagaagggatggctcgtgatgccaaatatattttttgtatggatccgttagacgggtcgtctaatatcgatgtgaatgtctccatcggtaccatcttttctgtttatcggcgtaaatcgccaatcggagaaacggcaaagttggatgattttctgcagagtggctgtgaacaggttgctgccggatatgtgatttacggttcatcaacgatgctggtctatacaacgggtaatggcgtgaatggatttactttggacacatctatcggagaattctgtttgtcccatccggatatcaaaactccggccgacggaaaaatatattccatcaatgaaggaaattatgagaaatttcctgtgggcgtgaagaaatatatcaagtattgccaagagaccgacaagaaaacaaatcgtccttatacttcgagatatattgggtcgttggtagcggattttcatcgcaatctgttgaaaggcggcgtgtttatctatccggaaacgaatagccacccgacagggaaattgcgcctgttgtacgaatgcaatccgattgcttttattgcagaacaggcagggggattggcgacggacggatgccgccggattctggaaattcagccggaaacaattcaccaacgcgtgccgttttataccggctcaaagaatatggtggaaaaagtagaggattttctgcgttttttcgaacaagtgtaaaaataaaaagataaaaacaatatgataaacaaacaattattaaacccttccagtattgtggttgttggagggtcggacgatatacagaagcccggaggcaaagtattgaaaaatttgcttgacggacaatttaaaggaggcttgtatgtggttaatcctaaaatggatgaagtgcagggtgtgaaagcctaccatgatgtgaaagagttgccggaagtagactgtgcgattattgctattgctgcaaaattttgtccggctactatcgaagttctggcaaaggagaagaatactcgtgctttcattatcctttcggcaggattcagcgaagagaatgctgagggaaaggctttggaacagcagatagtcaatacaatcgatgctgtcggaggttcattgatcggtccgaactgtataggcgtattgaatacaaattataacggagtgtttacaactcctattcctaaattggatccgcagggtgttgattttgtatccggttccggagctacagctctgtttattatggatgccggcatgcagaaaggtgtgaagtttaacagtgtttattccgtgggcaactctgcacagttgggtgtggaagaaattctggagtattgggatgagtcttttgatccggaaacaagctcgcgtattaagttgatgtatgtggaaagcattgacaaaccggacaaattgttgaaacacgcatcttctttgattcgcaagggatgtcgcattgctgctattaaatcgggcggttctgccgcaggtagccgcgctgcatcttcgcataccggggctttggcaagttcggacgtggctgtagaggcattgttccgtaaagcgggaattgttcgttgccatggccgtgatgaattggctacggttgctgcaatttttacatatccggagttgaaaggtaagaatattgttattgtgactcatgccggaggtcctgccgtgatgttgaccgatgctctttctaacggaggcatggaaatccctcacttggaaggtccgaaagcagaggctttgttgtctcaattgtttaacggttcttctgtcggtaatccgattgacttcctggcaactggaacggctgagcagttgggcgttattttggatgcatgtaatcgcgacttcgataatattgatggtattgcagttatattcggtagcccgggattgttccctgtttatgatgtatataaggtgttgggagaaaagattgccacttctaaaaaaccgatttacccgatattcccgtcttctatggttgtgaaggatgagattgacgagtttgtacgcaatggaggtgtatatttcccgtatgaggtgaattttggaaatgcgctttgtaaagtgttcaagactccggcaccccagcctgcacagccggaattgccggaggtggacgaggctcgcatccgtgctgttgtagataaggcagaaaacggatatctggctccggagcagatacatgaactattggaggctgcaggtattgcacgtgcaaaagagggtgtcgctgatacagaggaagagattgtggctttggctaaatctataggtttcccgttagtgatgaaagttgtcggtccggtgcataaatcagatgtgggtggtgtgaccttgaatgtgcgcgatgaggctacggtgcgcagtgaataccgtcgtatgatgcagattaaagatacgcatgctgttatgctggctcagcagttgtccggtacagaggtgtttatcggtgctaagcgtgaggctaaattcggtcacatggtgctttgcggtctgggaggtatctttattgaggtattgaaagatgtgcgggcaggattggctccgattgcggctcctgaagctttggatatgattcgcgaattgaagtcttataagattattcagggtgtgcgtggtcaggaaccggtcaatgagcagaaatttgcagaggcggtagcccgtgtttctatgctggtgaaggttgcacctgaaattttcgagatggacttgaatccgttgttgggtaataaagagaatgttgtggctgtagatgcacgtatccgcattgaaaagtaaagctatgaagaaacaggatttattatttatattaggggtagcagttttgctgctacccttttttgtgtgcgaaccggtttatgattggtatcatacgtttaatgccgagcatggcatggtgatgagttttatcaaatttgctgttttgtcgactatgggagaggtgattggtctgcgtatcagcaccggggtttataatcggaagggttttggaatactgccgcgaatgcttgtttggggtgttttgggaatgggtatcaatattgccatgattattttctcgaacggcactccgattgtgttgcagtatttgggaatgcaggatgctgtcggtgtatttcacagtgagggactttcttggggaaaggtgttggtggcttttgcggtatctgtaagtatgaatactttttttgctccggtttttatgacgttgcataagataacggatacccatatcattgaaaacggagggacattggccggatttttccgtccgataaaaatgaaggagacgatgatgaagctgaactggggagttctttgggggtttgtattcaagaaaacgatccctttattctggtttcctgcccatacgataacctttttgttgccgggaaatatgcgtgtattgtgtgcagcccttttgggggttgtgttgggcgttttgttggcgcttggggcaaggaaaaattaaatgcaaatgattgttttcattcccttttcttccaatgaatatgtcagtaaatctgcaatagtcggtttggcaatcacatcgtgcggcaggggatttcctgtatttcactgccaggcaaaagggtgggtttgacaatcgggagcaaatcaaagccagacgggaagtcgataacgtggtggatgggcattatgaccaacagcagaagaaaggcttttcaataagaagatgacccatgtagaggcatgttcaaataatcgtaatattttgaggttcagtcaaataaaaatgagtaactttgcaaatgaattaaagaggaatatggctgacataacaaacatacaagaatctgaatatgatgcaattctgcgacaggctgtcgcagttattgacaggacaagaacaatggtagcaacaacaatatgctctgccatcggttccgcccattgggaaatcggcaaactgcttcatgacagaaaacttgaaagcaagcatggtagcggtgtcgtaaaccgcctatcctacgacttgaaacaacgctatccacagatgggtgtttctccaagaaatctgtgggatatgaagaagttttatgagcgtttctgcgacagtgagccaaaactgcgacagactgtcgcagttttgccgtggggacatacattgaccctgatgcgtaagttcggcaatgacgataaagccatgttgtattatgcgcaagaaattatatcaaaaggttggaatcgcgaactgttatccagtgccatcactcttaaaatgcacttaaaaaagaatgaaaccttggataataatttcgagcagacactgccagccacacaagcgatgtttgccaatgaagtgttcaaaagcggttataatcttggatttcttggcgtaaaagatccaatcttggaaacggagctggaaacccgattggtggaaaaggtcaaacatttccttttggaacttggcaaaggcttcacctatcttggaaatcagtatgtgcttgaatataacggaaaacggagcaaggtcgatatgcttttcttccaccgtggtttgcactgccttgtagccatagatttgaagattggcgagtttagaccggagtatgcaggtaagatgaactactacctgtcattgcttgaccgcttggaacgcagagaggacgaaaaccgttccatcggcatcattttgtgtgcagagaaagaccatgtggaagtggagcttgccttagaagatatgggcaagcctattggtgtggcagactatcagctaattgttccacaagaggaattaaagaaagtggttgcagacgaaatggaagcgtttggcaaagaacttcctctacgcacagaaacaaagaaggaataaatcagcattaggaataagaggtatgcgatgaaaaatgaaatttatcatcctataaatatgattggttgtgagtgttcaatcaattctattagctacgatgctaccgagcttgtagttatacttgaccgatttgacagtaatcggaaagttacaattcgctttaagaatgtctatgcgtatcgtattactcttgaacatttcagaattaccgaagtaatggacggcttaactcttcattctcaaccattatatgaagttgaaaattctttatatttgaatgaactgatggcgagcgggatgaatgtattgtatggttcatcgctaaatgtgaagcattatacgataaacactactgaacatattgttgatatattaacctccgaaacttatatcatagaatgaaactgaaagataaacggttttggatatttgaggcaatagtgctgatatgctcactcatcagcatgattatttcatgggcaaatcattttatgcttcgtcccattttgtttcctgctgctttttgtttcctgtttcttgtcggaagtatcatcgcgtggaaactatacaacggaaaccaatggtggaaattggcatgatacgggagaacaccctgccgacttaccgcccgatgtcggtacatacattaccgataatgaattggttggaatcatattgctactgtggctaatcattgttcctattctttcttgtgcgatttcatacatttcaaacaattgaagtttctgtacgcacaaaaataatcaagcactttgctcttgaatttggcgcattttggtttatggatgaaagctatgcgaccaatgaagtacgttttgctgcaaatttagctgtcattcgtaaagaggtagcacgttctcatgatgatttcattattgagcattttcgcaaatatagtgaaccagaactgcctcctgtgtggttttagagaataactgaaattttgattagtaaaattggcttgtagcctttgacttgaaaaatatgataaaatccaagagtgccaaacggtattctccaagtacttcacgtaattgttggtatgccttttttttgagtgtcttaagtgtattgacagatatgtctaaccggtttgcaatatcaggattcgaaattccttctaatgataataataggattttgcgagtttggttcggtaatttttctatggcatcatacatgtatccgaatacttcttcttctactatttttcgatctgatggttcattttgtgtgcaatgaagccattcgttcaattcctgttcgcttttgtcttttactttgttatggcgtaggtgatccaatgctgcatttttgactatacgatataaataaacttgggcggaaacgggattgtcgaatgtgtttaaagattcccacaagtggataaaggcttcctgggtcaaatcatcggctattgaatcatctttaacgtaactgaaagcaaatgaccataaagaagtatattcctgctcaaacaattgttcgagcagggtttgttgtttctttgtttttgtgtaaatgccttgtttttgttggtttgccatatacatgaaaacgtatgcttcgcatttattatgcgttgcaataataggcaaatctttcgtttgtacaaaatagttttagggttattttttcttttcggctaattccaaggctttttcgacaacagtgatttcattgcccggcatgtatcctgaatgtgtccatacaattttattttcatttatgatcataatatgtgggactgctgaaatattaagggctttgtataattctttgttagtgtcaaataggatttcgaagggccactttttcccttttacaagtgattttactttggcggttgctcttgcatcgtcaatggtgacagcaataattctaattttgtctttccaatcatcctgaatgtctttcaatgcttccaattcgctttggcaaggcttgcaccaagtcgcccaaaatgatatgattacaggacctccttttacgaattctttgaaggatacttcttctccgtttaaatttttcaaaatgatgttttccggtacgttttgggcatgagtcggagctagccaacagaaaaacaataggataaataaaatgcttgttttcatttttttgttagtttttagttgaataatattttcttttttgtaagaacgttttcgatacgctatggggtgattaaatgccgtgaaatttttttgaaaaaaaagatattttcagtcaccctgttgttgatgttgtacgttattatatcagatattaatttaaaactatatttcatgaaaaaaatcttattttttatgttgctgcctatcatcggattgatgtcggtggcatgtgatgacgatgatgacgaaaaaaaagatggggatgaatctgcaacaaccaatagcttggtcttgacagcggatcgtccgtacattaccgcaaacggttccgataaggtgacttttacggtgaaagatgcagcaggggaagatgtatcattgaagtgtgtttataaagcaaatgaagaggagttggttgacaataccttgacgactacaactccaggcacatataaggtgtcggctacttacaagggtgttacttctaatgtgttggatgtggtggctttgggcgagaatgtcaaattgaaggttgtagccgataaaaaaagtattattgcggacggaggtgactttgcctgtctatatttggaggatgagcaaggaagtcgtttgccggatggcgaattttatgtgaatggtgaaaaattgaatactccgtattttgaaacggataaacctggcagctatcggattagcgcaatttggaaaggtaaagaagctgaagatgccttgacattaggagcttttgctgatggagaatatactcctcgtatgttggttgaaagttggaccggcacaatgtgtcaatattgtactcctgttattaaagtgctgacagagggagatgctgttgcccgtaaagagcctcgtgtgattttgattgagactcatcatggaggtgctatggaatatgatgcgagaagtaatgagatggataattgttttggacgatattataaggctaccggtacaccgtccgtatattttgacagagagaagactaaatttaatgctagtaatttgagcaaggaggttttgttgtcttctatcaaaaacaaggcagatgtggccattgcaatcaagacttctttttctgaagatcgtaaatctattaatgtagatgctgtagtgggtagtaaaaaatcctttaagggtaaaattatcgctgcattggttgaagatggactttatttgtatcatgttgagttgggtatgattgaatggtatcatacaatgcgggattaccgtccgtcttttgaagggggagatgctgtatctattgagccgaaatcattgaccaaggctcaattcaatattcctttgggattggcaaaagcagaacagagcaggattgttgtatttgttacgaacgaagcaggtactgttgaaaatatacaggaggttgttgcgggtaatagtataggatattagtatcgatttttaatactatagagaatgtgttattataaaattccttttttcctgatggtgtttgtagttgttttttccgggcttttacaagcccaggaaaaacagcaacgagattggggacggctgagtggaagtgtggagtctaattggggattttacatgaaagatgaggatttgggaattgaggaggtggatgataaagtggcaacaaatacctatctgacattggggtatgccatcaaaaatttcaggtttggattggagtatgatatttataaaccgccgttggtcggcttttctcccgaatgggagggggctaagtttatgcgtggttttgccgcttgggcttcttctaaattggaattgcgggcggggacagtgtatgaacagttcggtaacggtttgatattacggacttatgaggaccgggccttaggtattaataattcattgatgggagggagtgtccgttggcatccttgggattggatttccttgaaggtagttgcaggagtgcctcaaaaattccaacattatgcatcttcacaagtatatggtgtggatggtgatatggatttaggtgctttgttgatggctgaaagcgactggtttttatctttaggtggttcttgggtgttgagaaatgatgacagtgatgcccataatcctgagagtccgcgctctgtaaaaagttatgccgggcggattaatctttccaagggtatattttctatcggtggtgaatatgttgaaaaaagccgttctatgttttgggatcagaatttggctttaaaaacaggaaggggacggattgtattgatgaatttgggcattgatgctccaggaattggcttttctgcagaattcagggcttttgaaaatgcggatttgagagtagatgacaatttggatgaagatgaaagtgtcagtttgaattatgtgccgtctttgacattacagcacaaatacaatctgttgtctcttttcccgcatgaagtgaaaactgccggagagaccggaggacaattcagtctgtatggtgatttgcccttttgcagagagaatccgattgcttttgctgtcaatggttctatgtaccgtagtctgacgttggatgatgagggcgaagtcgtttcgttgttcaagcagaagggaaaactgctttatggtgaaatcggattggagttgcagcggaaatggggcaaaagttttaagaccaatctgttgttttatcatcagaaaaaatcggaattcagtaaatacggtttcggaaacatgaatatggattcggagattctggttgcggatttgctttataaaatcaacaaaaaagcatcgttgcgtatggaagtccagcatgtctggagtgattctaaggatgacccacgttgggtaatggggctgttggaattcggttttgctccggcttggatgctgtacgtaagcgatatgtgtaattatgacagctatggagaatctttgcactattaccggaccggttgcagctattcttggcgtagtcttagggcttctgtcgattatgggaggaatcgtgccggtatgcaatgttccggtggtgtctgccgttatattccggagcataccggttttgcagtttctttgtctgtctcgatttaagaatgatataaattaatcaatataaatctatgaaaatcaagtatttatttttaagtattttattcatctttatgacttggggatttatttcctgtaaggatgatgacgtggaagaggttcctgtcgagttggctattgatggaacccaaactgcatttgagttttctgctatgggtggagagcagaaagtggtattgaaaacaaattctccttggggggctgagatgtctccgatagaggatagttcttgggtgaaattaaagatttctgaaaaggaattattgatttgtccgcagcctaactggaatacagaagtgcgttcttctaaagtgaaaatttttgcaggtcaaggagaaaaggcaaaagcaatatatgtagatgtagtccaaaaagccggagataagatgtctatcgtattttctcctgaaaaggtgattttctcaccagccaaggaaaccaaagaagtgttgtatatgacagtgaatccgaatgtcgaatacaaatggtgtggagatacggcagtcaattgggtgaatgtacaattggatgtagagcatactaaatttgtattgacttctgagtttaacaaggcactaaacggtcggcgtgccgtgttggcagtgtccggtggtgtaggtaataaccgtttcaccgatactctggcaattgagcagatgggtaatgagccgatgattaagacaaatcctgacactgttagaattggtgctattggaggaactgtagatgttgaaattctttctactgtagaaaaatataatgtcaatagtggaacttgggcgagattgactaaaaatgagactgatacaactaaatatgtgttgactgtagatactaatcctaacacacaagagcgtattgaccgtctttatatcggcacaccttatggagtgatgccttctgttgattgccagttagtcgtgattcaggaagcaaatgaacctgcaaagatttctgccaaggataaagtcggatttgagactgccggtggtgaagaaatcgtagaagtgacttcttcttggtctaattgggaatttaagattaacgaagaagatgccaagtggtgtcatgtgacgaaggaagaaaaaggtttgaaagtggttactgatgcatcgaatctggaaagagaacggacaacagtgattaccttgactgtaggagatggtagtaatatagcatcttgtcaggttattgtttcacagttgggaactaaaccatcgttagttctttcaactaatttggttgctttgaatgaaaatggagacgaagtgatagtggatgtcgtgacaaatgccaaaatttgggctccgactttgccgagcagtgaagataaatggtgtgaggttgttcctgatttcaagaataaacaaatcaagattaaggctaatccagctgaagccggttcgcgttctgtagaattgattgttgaaattccacagacggatgtcaaagtcagtttggtgattacgcagagcaagttctataagccgggagatttgtttgtaatgaatggtaaaacattgggaattgtttacgaagtaagtgacggtggtgcacacggtaaggtggtatcattgaattgcaatagagacttgaatataatgtatcgttttggattggagtatgatgaagattatccagacaaaggtgtaggtattgttgctcgtagttgggataacggtttggaaaatatgagggcttacaagcagtttgataactggaagactcacttccctgttgctgcttatgttgatgatttgaatgatgaaaacggattcccgggatggtatttgccttctatcagagaggtcgaagctttgattggatatattgacggtcaaattttgtctcctaacggaggtactgatggagaaacgttaaatgaaccgacggaggagatgaaagaaaaacgtaaggctttcaatcagaaattagttgatgccggaggtaaggaattctatttctatggaaatgatgcatctttcattattgacaattcgaatagttgggaggcagattactttaaccggatttatacttcaactgagtcggattatcagttgcacccaagagtgtttatattctatttaagaaacggttggtggagtgaacatccgacatattcagaggaagctgcttggggcgaaataagaccgttcttggcattctaatgttttaattcatgaattatgaagagatttttgattaattttttgttgatattctgtgcagccttctttttaggaggttgctcagatgatgatgaaacaattgaaaaaggggcgaagttggaagtatctgagacttcgttgcgtttcggttcgttagcaacagaattaacgatacagttgacatcagaccagccttggaaaattatgaatattcctgcctggttgaaagttgtaccggaaagcggagatgcaggtgattttgaaatcaaagtgtcagcacttgcaaatgcggaggagattgagcgtaaggtgagattggaagttgttgccggttctgaaacatggaacttggctgtatttcagttggaaaaaggtgtgttggaattcgaagaaaaagaatttttggcattgtataaccatacttcactgaaggtgccttatcgtgcaaatgggactttgaatgtaactttcagtgatggagtagattggatatccgtgccggcttcaaaagctgtaacagaacaggatcttgtatttaaattgaaagtcaatgattccggtgtgcttagagaaacattcgtatatttggatgatactcaaagtggtttgaaggatactttggaggttgtgcagtatcctgaacctaaatatgaactttctggcagtaagttgtttgcgaagtttgatgtgactgaaaaaaaagaaggttttgaatgtaacattccttttgaggttgtctttgatgatgaaagtgtagattgggtttctttgaaggaaagcaaactggaaaacgggaagtttgagatgtctttcaagttggttcccaataatggtaataaaatcaatcggacgaatttccgattggaaaataaagtgctaggcttgagcctcaaaatgtctttcagtcagatgtataagacatttgatgggcattcggttataaggaaagagcccacttatgaagacccttttggtggagctggagccagtataggtaaacttacattcaattttgttttagtcggtgatggctttactaaagaagaaatagaagcaggtgtttgtgatacttattatgatgaggtaattgaaggtattgagaccttagaaccattcaaaacctattctgaacgtttcggatttattttgttgcatgcagaatcaaaagagtccggatgtacagatcatagtactatttatggtccgaagattgtggatacccgctttaagtgtgcttatgaaaaaaatggcaccggtatgacttgtgattatactgccattcagaattttgtaactgaaagtttgcaaaaagaaggtgtggaatatgaagccaagaaggatgttgttatcgtaattgctaatggaaaacgttatggtggtgtggctaatttgacaagaaccggagaggctgtagctatttgtcctgtttcagaggagcctttcccaaataattttattcagattatgaggcatgaggcttgtggtcatgcttttggcaagttggctgatgaatattcaatgggaggtccgattgatgcaactactgcaaattatctaaaaacatggcagagttccggaatgtatttgaacgtttctttgtcgtcaaccgaatttccacagccatggcaagatttgaagaatgccggtaaattacccaatgtatatgtcggaggttttgcctgttcaggaggtgtatggcgttcttctgaaaatagcttgatgaaagggatggatgaggggttcaatattttgagccgttatctgatatacctgcgtatgaaaaatctgcgaggtgaaggtatggatttgccggcagcaagtgttgatgattttttgagtaaagacaaagctgatgaaaaacaataggttattgtaagtggttaattatggaagtcaatagtagcaaggaaatagtctgtttgattattcattctttggttggggatttgaatgactcggaacgagctaaattggatagttggttgaaagatgacgaaaatcgtgcattttattatgctattagccaaaccgggtatgtcagaaataaaatcaaccgtttggaaaagacagataaaagcagggcttggcagaagttggaaatgaatatgaaaatcagacttagaaatcgaaaaatcaagatgttgtcagctatggtcgctgcagtgttattgatttttggagtgggtacgggaatttggctttctacaagaaatgcagttagtattgtgagtagtgaaccggaatcgggtgtcgggtatggcacccgaccggttattcgtttggcttccggtgaagaaatctgtttgttaaaagattccgtatataatctgagagacggttctttggaagataagggtggttatatccgttatcaagagacagcagataataaagtagaggcatccgaattaaagtatcatgaaatctgtgtacctaaaggatctgagtataaaatggtattgcctgacggcacgaaagtatgtctgaatgctgaatctgttttgcgctttcccgtgtctttttctgataatgaacgtcgggtaacttgtgatggggaagttttttttgatgtggcaaaggattctttgcgccctttttgagtcgagtctgcgggaaatctggtaaaagtattgggaactcgttttgatatccgtcattacgagggagagccttatcgggccatcttattatcaggaagtattcatttgagcggtcagggacagacggtattactgaatcccggtgagcaagcgagtctgttggacaatcggtgggtggttgaaaaggcagatttggaagcaatcggatggattgacggatattttctatttaaaaactgttctttagaacatatcatgaaagaattggctcgttggtataatattgaagtcttttatgctgacagcaggaagcagaatgaatattattcttttgaaatagaacgtagctgttctttaaaacaagtaatggagattttaagaaaaacaagaaccttagatgtagagattaatggccggacggttattattcgttaaataaattggtcgaaagtatgaaaattaacaaaggatataagtcccgacggggtatgtattgccgtttggccggggcgtttttgttgacgctgtttgtatttgtgacaccgttttcggctgaagcatccggacagcaactcagtttgcgtttggaaaacgtttcgctaagagaggctttcaaagaaatcagaaaacagctgggatataaacttgcttataatgagcaggtgttgcagaaaaatgtacaggtttccgtgaatgtttcgtctggaaatatagatgatgtgatgactcagtgtctggaaaaatccggattgggatatgaaatcgagaacaatgttattgtcatttatgccaagcaaccggatgtaaaagcggtagctcctcaaaaagccatgaagattgaaggtgtcgttacagacagcaaaggtggggttttgccgggtgttaccgttatggtgaaaggtacttctgtgggtgtcgctacagatatagatggtaaattcagtattgaagtggcagaaatgccggaaatgacattggtgttttcgttcgtgggaatgaaatcaaaggaggtgcccgtgaaagtgaaagacggaaaggcgaatgtaggaaaagtggtattggaagaagaggaaaccgaattggaagaagtggtggtaaccggtatgtttacccgcaaaaaggagggatttacaggttcggctgtgaccgtaaaaggggatgagttgaaaaaaatcagtaccacgaatattgcaaaggctctttctacaatagaacctagtttccgtatcatggaaaatatcagtgcgggttcagacccgaaccgtttgcctgatatgcgtatgcgcggttcttcgaccttgccttcaggagcgaccggagataacagtctggtttccctgcagggggaatatgatacctatcccaaccagcccttgctgatgttggacggctttgaaatagacgtacagaccatggtggatttggatccggatcgcgtacagtccataaccatattgaaggacgcttctgcaacggcaatttatggttcaaaggcggcaaatggtgtgattgtcattgagacctatacaccgaaacctggagaaatcaatgtcagttatggaggaaacctgcgtgtgcaaattcctgatttgtctgcttacaacttgatgcattcagatcaaaagattctagttgaggaaatgtcaggcttgtatgcaccgaatgatttgggcgcacagcgagattatcagagtcgtttgcgtgaagtgaaaagaggtgtggatacttattggttatcccaacctttgcgtacggcagttcaacataggcatgccttgacgcttgaaggaggtacggaagctctgcgttataaattatatgtgggagccaatcagactccgggtgtcatgaaagattccaaacggagcacacagactgctgctctggatatttcttaccgttatcgtaagttgagtatgaaaaacagtctgacagtggataattcaaccggtgatgacagcccgtggggatcattcagcgagtatacacgtttgaatccctacatgcgtccatatggtgaaaacggtgagattacaaagattatgcaaacatggaatatgctttatgccggaaattcggaaccgtttaaagtagcgaatcccatgtacaatacgacttttgacagtaaagaccgtaccagttctttcagtatccggaacttattcaaattggaatatacaccaacagatgcctggcgtattcaggctgatatttccatctccaagacaacaggaaaggatgaggtgttccgtccggcacagcatacagctttcgcagacgttgttgacccgacattgaaaggtgattttaagagaaatcagtcagaagacttcaattacatgtttgcctttacattgagttataatgatgtaatcaacgatatgcattatttgacaggaaacttgcgttattctgtcgagcagacacatagcgaggtgtatggagcaaccgtaaccggtttcccgaacggaaacatggatcatatcttgttcggtaagaaatacaatgaaaatatgaccggtagcgaaggaacgacacgtgccttgggtgcggtagctactttgggttattcttatgattaccgttattcagcggattttaatatccgtattgatggttcttctcaattcggtaaagacaaccgttttgctcctttctggtcaggcggtatccgctggaacatgaagaaagaaagctggttgagagatgtggaatgggtggatgacgtggtgctccgtgcctcttatggcgtgaccggtacgcagggattctctccttatcaatcccgttctgtctatacttataccaatttgatgaagccttatttcagttctaatgcaacaggaacagaattggtagccttgggtaataccaagttgaaatggcagcagaccggtacctggaattttggtctggagctttcgatgtttaagggtcgttttacgacacgtgctgagtatttcttgaaaaacaccaagaattcgttggctcagataaccttggctccttctatcggttttgcctcctatcctgaaaatatgggtaatctagagacgaaaggtgtggaattgaatttttctttcatcccttatcgggataccagcaaagatgcctattgggtggtatctatcaacggttcgcataataaggaacgtttgaaaaagatttcggatgccttacgtcacatgaatgagctgaataccaacaatgaaaaagataaacctctgccacaatatgaagagggacagtcacagacccgtatatgggtagtccgctccttgggtattgatcccatgacgggagatgaattgctgctgacgcgtgacggcaaggtgactagtgtctataatcccgttgataaagtgccttacggtgatacggaacccaagtggcagggaaatatcaacagttctttcaattacaagggattcggtgccaatttgtcctttaattataaattcggtggtcagatgtttaaccaaacgttggtagacaaggttgagaatgccgatttgcgttataatgtagataagcgggtattggaacaacgttggaaaaaaccgggcgatatcgctaaattcaaacgactgaccaattctattggaggttcagagactagtccgacatcccgttttgtgatggatgaaaatacgtttactttcggatcgctgtcgttgacctaccgtatggatcagcaaaataccaaatttttaaaaaagagctttatcagttcgttgaaatggggattcaccatggaggatattttctatctttcaacggtcaagcaggaaagagggttggattatcctttcgcccgccagtttgcgatttcgttaaatatagtgtttaaataatagatatgaagataggtaaatttatatatggcagtttattatttgccatgttaggtatgggaggatgttcggattggctggatgtgcagcccaagacttctgtaccggaagaggatttgtttgcggaggaattcggttttcaggatgcattgaccggcttttacttgaagatgggtaatcctgaattgtatggtaaggagatgacctataactatatggacatgctggctggccgttatgaatacgctcctgaggtttataattggaaggatgtgtataattacgaaggaacctataagtcaatcaagaatcagtttttttctggtgcctataatataattgccaatatcaataatttcctgcattatatggaggtaaacagagaggtgatagtaactcccaagtattatgaaatcatgaagggggaggctttggggttgcgcgcttttctgcattttgatttgttaaggatattcggacctgtatatgccgttgaaccggaaggtaaggcaataccttatcggactgtattcaataatgaggctacaccggtattgtcggcaacagaggtggtggatgcctgcttgcgagatttacatgcagcggatacgttgttggcaaaggtagataccgatatttttattcatgacgtggatgcggatccctttttggaactgcggcagttcagaatgaaccgttgggcagtaaaagctatgcttgctcgggtatattgttataaaggtgatgaggagagtaaagcaaaggcatatgcttatgcgaatgaagtggtggaaagcggtttgtttcccctgacagaaaaattgacgacagagaaccgtgttttgtttagtgaacatgttttcggcttgcatatttatgagatggagaaggtggtagaccctgattttataattccgacaagtgagatggggttgggggtgaaacaagacctttttgagcagttttatgatttaaaggccggtggttctactgattttaggactaaaagtgaagcgttccgttcaatgacactttcaaacggtgtgactaaaagagtcttgtctaagtatgaccagtctggatatgattcggatatgttgcctaaagagaccggtaaatattccggtgcggatgtgatgccgttgattcgtattcctgaaatgtattacattatggcagaatgtgatccgagtcctggtaccagtgcagaattattggatatcgtacggttcaagcgaggaatcgcttctgatgatgcaacggatggaggtgtcggttacgatgccttggacgtgcgggaaggatatgacaaggaacatacaagacgtatcaatgaattgatgcgggagtatttaaaagagtattatggtgaaggtcagttgttttatttttataagcgtcataattacaagacatttaaaaattgcagtctttcagatgtcagattaaaatatcagttgcctttgccggaaaatgaagaaatgtttggtataacaggaaaatagcagatgatgaaaaaatggatatgtggcatgttggtcttgttgaccgttgccgtttcttgtaaagaagaggatattgaggtatatagcggagaacctcgtatcgaatttgcttcgacagaagctaaatgtgtatttgacgacagagcttatctggaggatatcgctgtaagtcctgtagaattgaaagtgcgcagtttggggcatcacatggagaagcctttaaaatattttctgaaagaggttgaagaaagcggtaatgtggtcgtgaattctgaatatgagtatgtttccggtaatgagtctgcgactgctcaagtgacggtaaaacgtccggtgtcagtagatagagcttattacgtaacagtcatgttggattttgacaatgttgccaatggctttgaagcgggacgtacagaaaatttagaatgtaaaatttttgtcagttatgacatagaaccctctgattgggataaaacgttgtggggtatgtatagtaatagcaagtatatgtttatgatggatcatttcaagaaaatatatgttgccataccgcatactaaagctgcaagagatgaagtgaggaaagcctataaagagtaccgaaaacataatccgccgttgatggatgacgaagaaccgcaacatgagatatcatttcctgaagattagttggcttgaaaattttagaaattatgatgaaaaaatttatatggggattgcttgctgtgctgtgcatggcgtgttatgatgatttgggtaattatgattataccgatatcaatgatatgatgctggagatgcctaaaagtcttagtgtcgttattccaaaaaaagattccgtattggtgacggtaagggcttctgtttcacaattagacagaaatgataacggtaatctttcttttttgtggaaaaagaatgtgaagggtgtgacctggacagaatgcggaaccgattccatctgttctttgtgggtgtatccgaaagataagggacggatcactctgcgtttggctgtaaccgatcaggatcagaatatcgtgactttcggtgaaacgattgttaatctggtggcagcctttaaccgctgttggttcgtgttgcaggatattaacggacaatcggtattgggagctattgacggagatggtgaatcccgcgtggtgaatcaggatatctataagaaagagaccggaggtgtgttggttggaaaaccattgttcttgtctgtgaacaatatgcatacaaccgatatgcagagtgataagctggagacaaaagagactttggtgggtgtttttacagaaggtgggataaactatatgctggacggggcaaccttggaaaaccgttatgcttatgaccgaatgttgtattacaaacgtattgtaacagatgattcattgggtgtcggttcaaagaattacaatccgatttatgccgagggggattcaaaaggagaatgtattattgataacggagttttctggtacgccagacctgatgggtacaatgtctattatcctgtgaaatctgcaaatggagcatggggaaccagtccttatgaggactattatgcagagatagcttctatggcttatgtaagcggagtgggtctgaatattatttatgattctaaaaacaatcgctttttgtctcataccaacattgaaaatggcggaactgaagcatattggaatatgtatattcatgaaggaatgtctgaattttatgaggtgagtggagttttgaatagacatagactagagccgatacaggaacaggccggatatcccaataaattcaatccgaacgatatcggggataaggatgtcatttatatgggagccacgacttcgagggatgaacctaaaattatggcagtcgctacttcagggaacggattgtatgcctatgaattttctccgcagatgatgatgggggaagaaaaaggtgccaattgcagcgggtattgggaactgacgccggaagccgggaatctggaggaaaaattgccggtggctacatcagcctattttgacagaatgttctactatgcagtaggtaataaaatctatagggcagacttgacccgttctacaccgcgttcttacttgatttatgaacatcctgaatcttcagcacgaatcaccaaactgaaattccgcagtcagcgtgaggatcgttgggatgtttcaggtggagataatgtagatggaattccgtatgatttggtcagctatttgggagctgtggtggaatatgcttcgggagaaggtagtgtggtggagatgaaattgtctcaggctggagagataaaaaaagatgaagctaaattgccgatggcttatgaatacaaaggatttggtaagattgtcgatttcgtttatgcctttagatgatataaataggaggttttagtttttttcaggggctgtaaaaggtccctgaaaatttttatagtagaatgtatgttgcaaaaaattgtttgttgtgttttattgttatttctgatgactttggcatatggtcagacagaaataatttcaggcttgtttacaacctatagggaaaacgaccgtattttatgggctattccggaacaaatgatggggcgtgatatgagcttgaccactacaatattgaaaggagctgaccgtaagatgaagtctgtggatgccaagtttggatatgcaggagaccgctttggtccctgtattattcgttttgaaatagagggtgattgtgttattgtcaaacaagtgggagattatttgtccgtaaatgacagacattccttgaaagagttgtttgaagagagtatatcgcctgtagagttgcagaaatttgaaattttgcagcacaaagatagttcagttattatagatgtgactcaatggatacagaaaggacaattgtggggattgcgtcctttttattttttattgggtataggggctgaacaaaaaagcgatgttactgatattattggtttgccggatggtgtcattgtccgttcggaacgagtgtatgatgcagcagatcctatgcccggaacttctgctggtggtgaaataacacgatgggaaattggttgttgcctaaatcttttgccttgcaatttgatgagagtacgtcaggcatcatctaatgttggtttttttgctattccttatctggcattagatgatactgataaaacgagtgtggagaagatgcaggtgataaaacgttggcgcttggaaattgcagattgcgatacggcgcgttataatcgaggagagttggttgaaccatgtaagcctattgttatgtatattgaccggaattttcctcgaaaatggtggccgtatatattaaaggcagtcaataattggaatgcggtatttgaacgtgccggttttaaaaatgcaattgagggacgtgtagctccggattcagcagaatatgttttggataacgcagcgttgtcatggattgtttataaagccggtcctatggagaatgcttatggacgtccttttatcgatttccgtactggtgaaatattgagttgtcatgtagcgatatttcattcagttttcaatatgttgtgtcggtggtatgttgcacaaataggtgaagaacctgataatttatcagatgatatcatcggtaaattattagagatggttgtgacccatgaagttggacatacgttaggactgacacataatttttatggtagttctctttatcatacacatgagttgaaagattcttcgttgatgaaaaaatatcgtcacggtagttcaataatggactatatgcgacttaattatgctgtgacaggagaagatggactgtctgtttatgatagaataccccaaatcggagcttacgattctttggcaatagaatgggggtatcgttgtttccccggtttgtctcttaatgacgaacgaatagaattatcaacatggcttaaagagaaacagagtgagcgtagatatcgtttccaacgtgttgcagctataatgcctgaagcacaagctgaggatttaggacgtgtttcattggaaacagcagagcttggtatcaaaagacttactactttaggtattactgagcccgatatggaaaaatggggatgtggtgcttggtctgtgaatgataatagaaatcaagctgttcgtgaccagtattccgaatacataaatcaggcattgacttatataggaggacggcgaaaatgttggaatgtagatacgttgttagctgttgctgttgaaaaaaaggagcagaaggcggctttatcttttttacggacgtatgtattggatgaaaataccagattgcctttaaaatggagggaagaatgggcgaaaaaagtgattgcagatttagtcggtcggataaaatatgtagatgaaagtgtgcgtagcggaactagcaattattcagtggaagaatatcttgatgatatcaggaatattttgattaaaaaaaatatgacgaatacttgggatcgatttttgctttggcattacacggattgtgttgcaaattttatcaaaaacaatagtcggcaatatccagaaatggttgcactattagggcgcaatttgtggaaaatgaagagtgatttgaaaaagcataaaggtgtttgttgggaaaattggagaaatagtataaatttaataatggggcagagatgagcttgaaaatattgtctgttttgtttttttgggtgagtgttttttctagtgttgcccaaaataaaatattatcactagatgagaaatttgaacgacatgctgtagttggtggtatgttacccgtatatgaggttgatggcaagatatatgttttgattgaacatagtatgttagatcgagaattccttgttgttgctcaagtagataaagggaaaaattgtcgaggaagaatattggaatccaaaggggtttttgtattaaaagccaataaagatgataaattggatgtgtatagtgcagcaacgattgaacaattaacgaatacggccttgtcgaatggtaatgtgcttgaattggatggattgaaaattcctgagagtgcttggaatgttgccggtcgtatcggtaacggttttctagtggatgttacggattggctaaataaagcaggagaatggtatgaccttagcggaagtttgagattttcaaatgcagataagccggaaataataaatataactccttatgatgaaggagtttgttttaagattcggcattatgttatcagtaatcttaagcagggcgtggtggaaatggttcctgaaagtggtgtcgttccgatagaaatatcagtggttttgcgtttgttgccgagagatgtctgtaagcctattgtaatgtttccaaacagtccacttagaacacaggtggcattggattatggaattaatccgtttggatgtgttaaatgtgatagaggaatccattggaatattacagatgataaacctttgaagatttgtattggaccggaaattccggataatatggttgaaatattggagaaagttattgctaaagcttctaagattcttgatttgcagagggggatacaagtggtaaggaaatgtgatttgttggatgctacggatatgtgcggagttgtatttgcgaatgatgtaaaaggaataacaatagaaagcgaggtacatccagctacagcgcatttattgtttggacgtttggtgataggactgcaagcgtatgatcagaaaataatacgttggcagttgaagcatctttatcaaaatgatgataaacaatggatgctaccatccaagactgatgcttattggaaatgtgtggaagatgacttggaaaaagggatattgatgttgttggggattgataagaaaaagatgaatgagagtcaggatcgtagttatatgtggaaatcattgagatatgtgtatgccggagatcgtcagtggttgcaaggacctattacagcaacaggaagcggtatatgggatgaattgttgtttgtacgtaatgctcgcaaagaagtgttgaaggggataaatagaatggatgtggttgattattataaagaatgcattgctttaagtattgaagagtatttgactattttgaataaagttgaatggcagattggtgatgtaaagcgtttggtccgtttgttggaagaggatgttgccggtttttatgaaactgagtttgtccggcaaaatatgttggggtgtagcgttagagaagtgaatggaaatttaaagaaagtatggaaagaattttttaaacgagaaaaatggctgcaattagcgcaaaaaagtaatggtagtgaggtttttcgtttattagaaagtgaattaattcaaatcatagggaatggagaggaaacgaattctagtgctcagatgctcactcagcgtatttgtgttgaggttttttgtgaagaattgaaatcttgtcgcgaaacaatgaggttaggggatggtgttgcagaaaacttagtattgactacctgggaatcaatttatagacattggaagcagaaggtggaaaaattggcagaaaaagaattgaaatgtaaaaagattcgtgattgctattggtctttgcttttgaaggatttgtttttacagatataacctttatatttgtaaaaactttacttatgaaaaagattacgctactattgacccgtcatggggaaactatcgaaaataaaaaaaatatcctgcaaggccaattgcccggcacattgtctgaactcggtattcaacaggctgaagagttagctaagagattggtggaggtgccgttggatgtcattatatccagtgatttatccagaagttataagactgcggagattgttgcaggtcagaaaggtatggaagtgttttctactccattgcttcgcgaaatgcattggggtagttatacgggagatgcttttgaaaaggttgattggtataatcttccgtttggggtggagtcattggaagaattggatatgcgtgccggtgaatttgtaaattatttgcgtgtaaaatatccggggaaacgaattctggcggttggacatggggctttaaatcgggcgattttaaatcatttggaagggcgtaaaccgcttgagatgttggaaaagccaatcatgggaaatacggaaattgtagagcttgtatgctaaaaacagtatttggcatccatgagaatgttcggcaaacgaatcggagtattgtgcttcttccttttggggatacatgtgctttgggcgcaagagcataagcaagacacagtttcgcaggattctgtaaaacaggtactattaactctgcagggagtaattgtgggaggtgatgaaaaggagtcgctgcctggagcttatatctatttaggagaagccaagacacctgtcggtacgacagatgttgacggtcgttttgttattcagggaattcgtgctgggaagatacaattgtctgtatcttatatcgggtatgaaacatattctggtttgtttgagataaaggaggatacggatattgggcagatatgtttgaaaactattttgcttgaagaggtggtggtcgaagccaaagtcccgatagctgtgcaacatggggatacaacaaaatttaatgccagtgcagtgaaagtggctgttgatggggatttggaagcattgattaaaaagctgccggggtttgaaattgttgatgggaagattattgcccaaggtaaagaggtgacccgcctttttatagacgggatggagtattcttttaatgatccggcagcagcattgaaaaatttaccggctaagctggtgaataaaatcagtatgtacgaccggggaagcgatgaggctgaattttccggatatcaggatgggaaaaaattccgtgcgttaaatattgagacgcatgagcccaataaagctaagatttttggtagggcaagtgttgcatatggaattacttcgccggtaaaaaacacttttgaggaaaataattataatggagatatctatggtaattattttgatcggaaaaacaagatcactctgaatgcggatgcaagcaatcaaggacagcggtttaatatgccgggcagccgtttgggtggaggaaaagggtataatcgttctgaggggatttatgcaaatgtttctacggatattgtagagaattggagtatttctaccaattatcgttggtctgacaatgcgtctaattctgcttcgatgtcgaaacaggagtatttccctaccgagcaatatgagaaccgtatatatgacaatgagagtcgatcccgtcgggatgggaataaccattcttttaatgctagggttgaatatactccgagtaaaaaaagtcggtttgttttttctccatccatatcgacaggcaagtccaattcctggagcattgcttatggttcaaatgtagaaaataacgatacggttaatatttcaaatacagagaattggagtgatggaaatacattgcgggtgaatggtagtgttctttggatgcaggcatttaggaagaaagggcgttcgatgaccatgaatatcactgggggatattcacgtaatttatcgaaccgatggcaaagtaatgatgaacattctttgaaaatggacggtgtttatttggatacgcttcgtaatctggctacagataataaccagaaagattataattggtctgcatctttaaggtggtcagagcctctgtctgaacattcacgtttgacattaaattatatgtatcaagatcgcatgagtaatgctgatcagtccagtttgtcatatcgggataaggattttcaggagttgataggtattgattctactcaaacaaatgaattgaaaaatgtgtatcatgtacataattatggtataaattatagttttaccaatgacaaattgcgattaggtaccggtctgtcttttagcaatacaacgatggataatcgatatagatatctggctaaaagcgattctgtgttgattagccggtatatggatgtttcgcctatgatgagttttggctgtcaaattaatgatgacagtaatttggatgtcacttactcaggaaattcatcttccccttctgtgactcagttgcaaaatgtgttgactattagtgatccattgcaagtgtctaagggtaatccaaatttgaagaagtcatttactcacaatttgatgatgaattatacttattctcaacttgaaagttcgggatttttgaatgcaactttgagtgccggacaaacatttaatatgatatcttctaatgtgcagtttattaatcgagatacaattgttgatggttatcttttggcacgaggagctagtttgacagtgccggtaaatttaaatggaagttggaatctgtcaggtagtgtatcctattcttttccatgggaaaaattgaaattacgatttaatacctctatgggatatagtttttcgcatactccttcaatttataataatttggaaaatatgaatagttctcatacaggaacgatgagtgtttctatatatacaaatatttctgaagatatagattgttatctttcttccagtaatacgttatcttggtctgaaaacagtgaaaccggaaatgccagatattataacagtaatttaaacggttcgtttaattggatattctggcgaggcttttatgttgagacaatgtataacggaagttttcatatcacaaaaaaggacgaacgagtaaaacaatcagagcatatacttaacgctactgtcggtaagaaatttggtaaggaacgccagtttaaagtttctttgtcagcaaatgacattttacaaaatcgccgttctatgacttattctttaactgatttatctaccaatgtttcttataatacagtaccttcgacatgtattatgttgggagtgtcctatcgctttgataacatgaaacggcattgattatagctcaatgatagttttgctgccataaggaatgtcttcgtcaaatgatttttcaatcgtacaccgttttgcgtatactaaagcacaggcgataactccccgatgtgtaaatatacagcattgctgttgagggagagtacgtatttcatcgagaaaatttgaaacacgttggtactggtccatatagctttctgctcctccagccggttcgtttatccagtctttataccaaaggtttagatgcggatcggagattgtatcccagcgttgcatttcccaagtgccaaaatttaattctttaagtcttttatctatcagtgggtgtgtataaccgcaaaaatcggccagttgccggcagcgagacagaggactggagtatgcgatatcaaaatgttctttttcgatgcttttgcgaacttgctctgcctcttggggaaatgtggaagcagtatcaacatcgctccagccatagcaaatgcctgattctacagcgacgcttgtatgtctgataaatgtgagtttcatagaaagggtgctgttgttatgaaaaaacctaaatagaatgcctgttctgacaataatacgctagctccgcaacaatctcctgtgtagccgcctattttgcgtttgaaataatatcgtaggcctgttgtaatgagaatcatcggaatgacagcccaaaagtttgtgccgagaaagtataacggaatgatacatattactgccattagcatgaatttgcggagactgatgggattgtatagaacttttgttttgcttgtctcttccgttcgtgcatagtctaatgtattgatcataaaagcagtgacaaacttggacagaacgtctgctcctataatgattcctgccagggcatttgttggcaatgagtataggaaagatgcatatagaaagaaatagacgatcagaccgattgtaccatagctgccgatgtgcgaatctttcatgatggcaaggattttttccttattaatccctcctccgaaaccgtcgaaaaaatctgccaggccatcttcatgtaaggcgcctgtcaataacagtcgggctgcaatagctaaaatacaagcgggtaaatcagcccaaccgattgtgctgacaatgtataggattgcccaagtggtaaaacctgttataaatccgactagtggccagtatagcagtacattgctgtagtattttttatccacttgtacgaaccgccataaaggtagacgggtaaacatcatgattgcagccaaaaatgagcgcatgttaaaaatatttggttacagatgctgattgaaaatcattcatttcattaatcatacggatggccgattctatgattggataggaacatatcgctccggtgccttcgcctagtctcaaactgagatttagaagaggacgagcatgcaaggcttctaaaaccaatttgtgtccggcttcatctccctgatgtccgaaaatgcaatattctaaaacttccggatagagttgtgaagcggcaagcacacagttggtcatgataaagccgtcaacgatgatgatcatgcctagttctgcagcacgcaacataccgccaactgcagcaaccatttcgaagcctccgaaccagcggataatatcttccggagtatggtcgccggaataattttccatagaccgtttaaggatattgtatttgtgttctataccttgggagttcagaccactgcctgcgccaacgcattcttttaaaggtattccggtgaaatatgtcatccatagggaagacgctgatgtattggccatgcccaattctccgaaactgacaatgttggttccttcatggtaggtcatgtctacgatttccgctccgatttcgatggcacgttccatctcttttttactcatggcagcttcgtaaagataattgcttgtgcctttccgtattttgcggtcaattagtcccgggagattatgaaaatcggcattgactccgcagtctacaattttgagcgcaaagttgtgttggcgtgcgaacatgttgactccaccacctcctttgacaaaattataaatctgttgtgctgtgacttcaggtgctgaaaagctgactccttcaacgacaactccgtggtctgcagcaaaaacgatgttttgtggtttgtgtaattggggtgaaaggttttgttggattgtaccgatttgtacggccaattcttccaacctgcccaaagagcctttcggttttgttaagttgtcaatcttattttgtaaggcaggtatgatgtttttatccggtgttttaatattaaaagttctcatggtgagtttattgtgggttattgtttgatttttataggtattccagataccattagtacaacttcatccgcctgttgcgctgcaaattggttcatccatccttgtaaatctgtaaatcgtctttgtatcagactttcggatactccgcctaaaccaatttcgtttgtgacgaatataaagatggcgtcctggtcagtgaaacgtttgaactcttctttaagttcggaaagtgatttgtcgacatcggagtcattgtcatagaaaaaatttgttgcccaaagcgtcatgcagtctataacaatgacacgtcctgataaagagtgtttactcagctctttctcttcttcaatattggtccattgcggtcctctgtcacgttggtgtcttaagatgcgttgcctgtattcttcgtcccataccctggaagtggcgaggtatacaggattgtcggctaattgtagggctaaacgctgggcatatccgcttttacctgagcgttgtccgcctgtgacaaggatgattttttttgccatatctttcttttttttgctccgtaaagatagctcttttaatttagaaaatggtggtatattgttatctttgctacgagtaaatagatgaataatgaagatttatacacgtggcggtgataaaggaaaaaccggtatccatggaggttcgcgggttgacaaagatgatattcgtattgaagcaaatgggacgttagatgaattgaattctttgttggggttgatacgtgcacaagcgggtgaaacacatgaatggcaagaaatgctttgttttttgcaaaggcagttgatgattgttatgtcgcatgtagctacaccagcagaactgcgtgaacaaaatccgaatccgttattggaggatttggatgtttattgtgaaaaacaaatagatcatttgaacggtcggattactcatccgtccactcattttattttgccgggtgggaatgtactttctgcacaatgtcacgtagcccgaaccgtagcccgacgggcggaacgccgtttgtggactttgaatcgggtagatgaattgcctcccgtcattttgcggtttgtaaatcgtctttctgatttattatttacaatggcacggcaggaaatggatcgggaaggggcagaagaggaaagatggcaatcgtttttatataaaaagaaaaggcaatgaaaaaattgaagcctattatgtttgtagggacctgctcggatgcaggaaaaagtatcataaacactgcattttgccgcatttttttgcaggatggttatgctccggctccttttaaggcgcagaatatgtctttaaattcctattcgactccggatggaggggaaattggaagggcacaagcggttcaggcagaggcttgtagaattgctccgtcaacagatatgaatcctgtgttgttaaaaccatcttcggatcagacttcgcaagttattctgaatggtcagcctgtggggaatatgtctgcacgggagtattttcgtataaataacaaggaagatttatggagggaggctttggctgcttttgtgcgtttggagaagtgttattctccgattgttctggaaggtgccggtagtatttcggagctgaatctgcgtgatcgggatattacgaatatgaatatggctcaaaaagttgatgctgcgacttatttggtggcagatattgaccggggtggggtgtttgcttctgtatatggttctgttatgttgttgccggaagagcaacgtcggttgctgaaaggtattattatcaataaatttagaggtgatgtttctctttttgatgaaggcaggaaaatcattcaggatttgacaggaattccggtggtgggtgtgattccttatttccggaatattcgtatcgaagaagaggattctgttgcattggagaacaaggctgccatggctgaagccgggaaggtgaatgttgcagtcgtgcgtttgcggaggatgtctaactttactgactttaatgcaatagaacaagatggacgttttcatttgtactatacggataaaccttcggaaatagataaggcggatgttgttattttgccgggaacaaagaatactatagacgatttgttgattattcgggaaaacggagttgcagatgctattatgcgtgcaggactggcggggaaaaagattattggtatttgcggtggttttcaaatgttgggaaaacggattgaagatccggaacatgtggagggtgtgaccgaaagtacagaagggttgggtctgtttccattagtcactgtgatgcagacgaaaaaggttgtttgtcaaagtgattttaattttaagaataagggttcatggtgtaagggatatcaaatacatatgggtgtaaccatcccccatgagagaccgctgtctgttcaagagaatctaaacatgctggctgatgggacatttgagggatatgtcttaaatgagcactgttggggaagttatatgcatggtattttggataatgcagtggtgttggatgatttggcttccggatttgccaatgtgccggaaactggttttgattatcttgcatttaaggaaaaacaatatgatttactggctgaacatgtacgggcagcagtagatttagattatatttattctacgttacagttatgattcatggacatggggacgacctttaccgttcggaagcagaggtgagggcgaatttttcaacaaatgtatggtatgaagctgatatgaagcctctttgtcattttctggagacacggttagagcgtatatatcactatccggaaccggatgctggttctttttgcaaagtggcagcggactatcatggcttgttgcctgaaaatgtattggcggggaatggggcgacggaattattttatttggtggcacatgcttttgccgggcatgatacgttgttgccgataccttcttttaaggaatatgaggatgcctgttcgttatatcagcatcatattactttcgtgtctcatacgaactcggaagacctgttgtcggttgggtctttgatgtttatttgcaatcctaacaatccggatgggcgtatttggtctgaaaaagaaattcgtgctattctttctgccaatcctgatcgagtggtggtcgttgacgagtcttttatttggtttgccccagaagcaagtacggcagttccgcttttgagagaatatccaaatttgctgattatccgttctatgacaaagtgctatgctatacccggcttgcgcttggggtatttgttgggagataagcacctgatagctgaaattgcccgttttacatttccttggtcggttaatgccttggctattgaagctggtaagtttctgttgcagagcggtgattctattttaccggatgcaactaatttattggagaggcagcgatgtttttctgctcaaatagcagcattgccaggtttccagcccttggaatcgcatacctctttctttcttgtgcatacggatgcggatgttccctgtctgaaacagtggttgttgcagaatcatgggctgttgattcgggatgcatctaatttccgaggacttgataaacattattttcgtatcaatactcttacggattctcaaaataatcttttgcttgaagctttacaaatatggaacagtgttggttgataattatccctttggtagtcgggtatttgttggatttatggttaggtgatcctcgaaaattgcctcatccgattgtcggtttcgggaatatgatatattggattgagcgtttatggaatcatggaaaaggacgttggttgaaaggttgtgtcgtggcgttgttatatcctttgtttgtattagtggccggttggggaatttcttgtgctgctttcatggttggtgattggttttattgtctgattgccagtgtttttgttttttatggtctggcgaacaagagtctgatacaagagggggctgaagtgatacgaatattgcgtgaagagggtttggaggccggcaggaaacggttgtcatggattgtgggtcgggatacatcggaactgacctctcgggagatttatacggccgtattggaaacaatgtctgaaaatttaagtgatggtgttgttgctccgctgttttattatgctttaggcggtttccctgcgatgatggcttacaaaatggtaaataccttggattcgatgattggctataaagatgagcgctatcgccgtttcggttgttgtgctgctcgtttagatgatgcattgaattatattcccgctcgcctgacggctttacttatggcattggttgcttatcgtagaggtctattccgttttattttgcgaaattgttatatgcatgccagtcctaattccggattcccggaatcggccatggcgggtattttggattgtcgctttggaggcgctcatatttatcatggattgttggtgcaaaaaccacatattggagacaatgaccgggaagtcagttacagcgatttccgtctgacagtgaaagttaatcatagcgtgacgctggtctgtgtattaattattatcgctgtcacttgcttgcgctacatctagtaaagaatgtccggtttctgcgctgtaaaagtgaatataacttgcagtgactttattttttcggtagatgagggtgttgactatgttgtttttggcattgagacaccggcctatggcagggattggattttcttctggtatgatatgggaatagtgaaattcgtgtccgtggaatgtgtggttgccaatggctacattacgataacccagttttaatttcatgttttccatggtagccgtttgtgacagaaaaccgcacatgggaaaatattctccctgttcgttccggatggcatcgcacaaatacatcatacctccgcattcggctaatagtaaaccatcgttttggcaatagtccaaaatagattgcctcatggagcggttgtcacttagttgtggcaggtacaattccggatagcctcctggtagatagatgaaatcagcggttggcaattctgtatcgtgtagaggactaaaccaagagattgttccatgttgttctaatgcctggatgtttgccgaatagacgaaattaaaggcttcatcttttgcaaccgctatgcgcatagaaggtttgttggaggcatggggaatgtctgttgcttgaggcgtttgttttaatgtaagtcctaatattttgtcaatcaagactgttttttcaatttgtgttgcaattttatctgcaaaattgtggaaacagtattcagagtcaatgttcagtcctaaatggcgagaaggaatttcaatatcggaacatttgggcagatatcctaaagattcaacacctgcatcgtgacaggcttgtcgtaaataggcataatgagtcggagagcttacaaagttgaagattactcctgcgatttttatgttgggacgaaaatgtttgaatccatataaaatagcagcaaccgtgtaagccgtagagcgggcatttacgattaggatgactggaatccctaacagttctgcaatttctgcgctgctgcctttcatgttgtcatatccgtcaaataatcccatgactccttctgtaatacatacgtctgctccagcagattgttgagagtaaatagttaggacatgttgtggagaagacatgaatgtgtctaaattgtatgatgtccggttggctgccatggaatgatgtttggtgtccagatagtccggtccgcatttaaaaggttgcacatttaatcctcgtttgtataatgcccgtaataatccgagagtaaatgttgtttttccacatccggaagaagtggctcctatgagaaactgaggcttttccatatatagtcagatttagtgttaaggttgaaatgtttttttctgtcgttggattttacgggatatatatttatatcctaaccagactccagtatatgatacggcagctccacctaagcaaagtgtccaaataagaactgtccataagattggtctctcggtaagacattggatatttaaatagtggataccgttaaatagccatttctttatctttttgttggtgtttaaatagcggatgtagcctgttgtcgggcaaacatagtagagggatttttcttgattgtctacttcaattttgtataccggcagagggagtgacaagctgcgggaaagatagtagttgtcatattcatcgagtatgtttatttcgaatttgcaatccttaccatgtattttttggatgcctgctaagatggtttcttgagggatatttaagggttttacttcagatgttgaagcatcgatgtattttttttcttccccggaaatgatttcatatgcggggatattaccgaagtgagtccacgtgacttcttttaaatctgggtaggtgtttttcagtgttcggtaatctaatcggtaatctgatagcggtaaggcttttttcccccacattttggaaggtcggaagatatattcctgttccatggggacaagccattgaggtatacgctgtaacgaaaatatgccactgataccccaggctaatacaaaaaaaccgaagataataccggttgtataatgccagcggtaggatggtttgcgatagggattccgaaatgtatttccttgtttatggcgtttttgtaatatatgcagagtaatgatgattccagttagtgctgccagggtgcatagaatgcctccgatggtgatgcagaccttccatatatctaaatctcttcggatgaatggaagataaaatttatggggaatagctcctagccaagcccataggcggctttggaagttggtgatttgtagtacttctccgctgcggctggaaacaaagatttcatgttgccgggggtcattgaagtaaaaacggtaaatgggtaagtcttgttcgtatttggagtataatacccattgttcgcgttggtgcagggtgtcaacctgtcggatgtttgcattcaaacaacgttgtgcggctgtttgtgctgtcgcaaaagtgatgggaagaacgttttgcagtgtgtcagcacaacgggtatgtttttttttgttttttgtgtaagaaaggagtgtttgattttggaattggcggatccgaaggttttgtattccttcggattcgcttctcatatatgtatgaatatccggcaatgaatcaggtaatgtctcttgtagggcatatttctgtgcattggacaatcgaggataagggtgataaatcaacactaatcccgtgaggaaccacattagaaaaaagagtgctatgatggttccgatgactctatgcagagaaaagaaaagacgaattatctttttcatatggccgttgtttttagtcgtggatataaacgattcggttgaagttgtatccttcctgaatagtgatacctttgcttacttggtcttttttgatgtcataaacataaacaacaggagctgatttttcaggatttactccgatataggctttgccgtttagtataaaagaacgttgagagaaggttccgctgctataaggaagtagattgccgttataggtaagctcttttttgtcatcagtggttaggtctaaaacagcatagtagcaattgtatttatcgccccatccttcatatattgcattgtcgctgctgataccggtgtgtttcgggtcttggatataaagcagggctttgttgttgcctaaataatctacggttactagtttgccttgttggtatttgaatccttggtagtttttgtcaaagtcatattgatttttgttaatacgaagcagacagccatattggcaagtggatttttctgagtttggaatgcggctgttgcaagcaatgtagagattgtcgttgtcgtctaaaaacattttgtgttgcaaaagttctccgtaagctgttcctgccatttgttctgcatggtcttcttttacgtagtttttaacggtcatattggtcgcatcaatgaaagcaacgtagaatgcttttttatcattcttatcttggaatgcatagatgatggtattgtctgatttgcggtatctggccaatccggaagtgctgaattttgtgaaaccgtttttttcagctaaacctaagttgccttcggctatgatttccattgtagcagcatttaatttagtccaaataatttcatcggctttaccattggctgcgatgattacaagagtattgtcatcaatccaggcatgggtatagcgacggtctttataagtgttcgttttaaagggacgttcttgtatggttcgtaattcgttgtttacgatttgatattttccaaagcacggttttttacagggtgcagcctgataatagtatttgtctttgatgatagtctcttcatcgatactggctgttacatcacatcctttattgatgaaatcaatggttttgtcttcttccagtgagttgagactttgtactaatgaagtgccacctttgcccatgcctgaagtttcgtctaaagaaacccaaatgtcatagtgtacattttgaataatttcttcatttttgtcgggatcggtggcatgggtatcgttgttgtcgctatcatcacaagcggtaaagaaagctgtggttgcaagtagcaacatagcccaaaataaattgaatgttttcatttgtgtttttgttttataaatgtgttaatgtaagaataatctaagtttacaggtgaatgaacgtcccggtttttgtagcatgaaattatcgtatagtttgctgtcaaaaaggttgttgcactcgacagatatgttgtaacggtcatttttcagggagtaactgataatggctgtgtgtaaatgttgggtgggaatgcgtgatttacttttgagggagccgtaaccttcccaagtaagaaagaaccaatggacgtattggtagaggtagctcaagcgcagtttattggttttgcctccaaaatctggttgagcccaagagatttctccattaccgtacagccaaggtttgttagggattttatttttataaatgatactgggttttccgtcttttttgaatttgttcatattgcgagattcttggtagctgcagttggcagtgaattgtaaacggtggtcgtattgatagcggatttctccttcaatgcctttgacattgacatcagagacgttctcgtattggatggtcccttctgcttcggagatgacagcatggatgtagtcttgtacctttctatagaaaccggttgcttcgtaagagaatgtgtggtgttcggcaaaggggtatgtaccgaaaatgccgatgttaaaattatggctgttctccggttttaaagccagattgggataaacagtgctaccgttgcctaatagttctcgtgccagaggaagtcttacggcatgttcataggaagctttgcaagcgatgggttcacagaaaatatagcgggatccgattccgtagcccaggttgttttcgatcgttttgtctggaacttcatccgagttggttatccacgatagatccgtctgttctattttgacatgattgatatagtctttgatgaaaatattgttggacattttttcttcaaaaaaggattgggtatagcacaagcccaggatatgtttggaaagaatatcgttggaaggaacgaaatcttcgtctaattcatcggtgcgtttgttgccattgcgatgcatcatgtagttgagattgaacgcatgtttatcgttcagatgataatccagattgatgcgggtaatggtcagtggacgtttataagtgcgcaattgtttggcgcgtccggtgatttcattacgtgggctttcgaaataggaaccgtcccattgatatttgcgataggcagtatctatagtgacggagtgatcccaagtgtgtgagactaaagcattgagttgtaagccttctgtaaaaagatttcgtttgttgtagcgagcagcgatattccaagcgtcttgttcgcgttctgccataccgtagacgatggtttgtacggaaccggtctgtatctctttgttggttttggaataggaaccggatacataaaaggcatcagtccattttttattttctactccgatttctaattgtgccaataatgagaaatagtcatcgtgaaagcgtttgacatgagttggaagatatttttgggcttcttcgttccataattcaacgcctttcatagtatagtcatttttggaatagtcaatacccaatgttggttttagtatgatttgagttttgggcaaaacggttaatgcattgagattgataatatgagtgtggaacgaaccgatgctataggatacgtctagaaagttccgtttttctttgcgggtaatgatgttgatggccccgcctaaggcatctgcacctaaatgggtagggacaacacctttgtaaatttcaatccggtcaatggcgttgactggtagattgactaaagatatttcgttgcctttgatgtttagtggtacgtcgtcaatgaaatagcggatggaattgccggacataccgttgagcgaaagatcgtaatctgcgcctaatccaccttctgtacggactctgacacctgaagtgcgattgatgaggtcgttgagattggtgattgtgttggtggctgatttgacattgatggcattgacagaataggcactttcgcgcatttgtctgattttgcttttaccgctaatctttacttctttgagttggatagtatcttcttggagtatgaaattaagagtttgatttttatgggcattaatttttttactggaaggaacatagccgacgagagaggctgtgagggtatattctcctgtaggaagctgtagagtatagtatccagtactatctgtattggtacctaagttggtgtgttcaatccgaatggtggcgtaaggtagttttttgccttgggtattgtaaactctgccagatagggtaataggggtttgggcttgaatgactccacttcccaataagaggatacagtaaaatacagtacaaataatacctttcatttttcttgtttttttatgtttcaatatgccacgagaaaatatgaaagaatacgtccaagtctttagttgtaattggaaagacatgggggtgatttctttagctctattcctcgaaagctttgaaatagttatttttaatggcaggtcttctgacttactccgtctatcgaatgccttcccatcttttaggacagtggcatagagtctttcgatgacattttatggagcttacagcaacgggcttgttccggatttgcaccggattcccttttaatcgtattctgcagagttgcagaatctgaaaccattatgagcgcaaaggtaatgatttattttagaagtaattgatatattctgctataatttttattacttttgttttcgattttggtcgataatgaatgttcattgattgtcgaaaaaagggaatccggtgcaaatccggaacagtgcccgctactgtgatacttctttattggtatgaaaggcttcttacgccactgtcttttgagatgggaaggctgcttttctgaagtaagtcaggagacctgccagaattgtaatgaatataaacatcttccgggttagaagggttttgattttttagtttaaatctttggtgtatgaaaaaagcaagattggttatgttgttggcattgttatttgccggattgaatgtgtttgctgattcggatggactttttgtaaagtctgatttgtttgggaatttgggcattcgtgaaaaaggggcggtattggtggtgcatttcggtacatcgtttgatgatacacgtcgattgacgattgatgcgattaatgcgagaatgaaggaggagtttccgggaatagaggtgtgggaagcatggacttccagaatgattttgcgtaaattggaacgggaaagaggtattgtacgtatgaatcctacagaggctttgattaagttgcatgaagaggggtatactcacgtgctggtacagtctacgaatatcatagaaggaacagaaatgaaagaattgagaagggaagtggaaagtttgtctttgaattttaaggatattcgaatggggaatgcattgttgtatgcaccggaagattataaggatgtagtgatggctttgacaacggttattgatcaggaagtaaagaatgggcaaaaagtattggttggacatggaacgccagatccggctaccgcttcatatgcgatgtttgattatatgttgaaatcagaaggtttttctaattatcatgtaggaactattgaaggatatcctgcgtatgaagatgctgtacgtttgttgaaaaaaggaacttctaaagtggttactttagctccgatgatgtttgttgctggagatcatgctcggaatgatattgcaggcgaatggaaagatcgtttagagaaagaagggtataaggtgaaactttatttaaaggggttgggtgaaaatgtagctattcagcagttgtttgtaaagcatgctcgttttgcagctgagcataaattagtcgatatgagtgctaaaaaggcaagatataaaaaaggcaaggtgtagagaaattcattacatttgtaaatgagtgaatgctgtagttaaagttaaagatagagattgtaatggaaataggtaagatatatgtggcaggcataggacctggaagcgagtcggatattactccggctgtatgtaaggtgttgtcagaggcagatgtcgttgtcgggtataagtattattttgcatttatacgtacccttataaaagagggagcggaatgtgtggataccggaatgcgcaaggagagggacagggctgaaatggcatttgaatatgcagagcaggggcaaattgtctgtgtggtaagttccggggatgccggtatttatggtatggctcctttggtatgggagatgaaaagggagcggcattctaatgttgaaatagaggtgttgccgggtatcagtgcttttcagaaggcggcatctttgttgggcgctccggtcggtcatgatttttgtgtgatatcgctgtcggatttacttacaccttgggagaaaatagagagacgtattgtagctgctgcaacagctgattttgtaacagctatatataatcctaaaagtgagggtcggtattggcaattgtatcggttgaaagagatttttttgatgcatcgggatgaatccactccggtgggatatgtgcgtcaggccgggcgcgaggaagagactgtcgtggtgacgactttaaaagattttgatccggaaaatgtagacatgtttacagtggtgctgataggtaatagtcagtcttatcaatggaataaccagtttatcactcctcgtggctattaccatgagactcttgcaggaaaccataaagtggggcaggaaatcatgattcgtagtttccggactattgcttcagaattgaggaatccttatatcccactggattgtaaatgggctttattgcatgctattcatacgactgcagattttgatatggaaaatatattttattccgatgccggggctgttgagaccatttataatgcattgagcagtggtaaagtgaagacgattgttacagatgtgacgatggctgcttctggaatccgaaaaggggcattggagcgtctgggtatagaggtaaagtgttatttgagtgatagtcgggtcgctgaaatggcgaatcaaatgaatataacccgtacgcaggccggcatccggttggcagtagaggagcatccggaggctctctatgtgtttggcaatgctccgacggctttgatggagttgtgcagtttgatgaggagagggaaagcaaatccggttggagtggtgggagcaccggtcgggtttgtaaatgtgcgggaatcaaaatatatgctgaaatcttttgtcggactcccgaaagtgattatcgaaggtcggaagggtggaagtaatttggcagcgacgattgtgaatgctattctttgttttgatgatgcggtgcaattgttgccgggaagggacctttagaaaatgtatatggtggcatgagtaaattctatgttatagggatagatgataacggggaacgtgagttttctgatgagttggtcaagttaattgctgcccatcaggtgttttccggtgggaaaaggcatcataagttagtggaaagatatctgccgcaggcatatcgctggattgatataacagtgcctttggatgttgtgtttgatgaatatcactgttggcaggaaattgttgtttttgcatctggcgaccctttgttttttggttttgctactacgatacaaaaacgtctgcctgatgcggaaattatcgtgtatccttactttaattcattgcagatattggctcatcgtttggtgatgtcttatcacgatatgagtattgtgtcgttgaccggacgtccttggcatgaatttgaccgggtcttgatagaaggtaagggtaagattggagtgttgacagatcgcacacatacacctgcagttattgcagcaagaatgttggagtatggatatgataattatcggatgacagtgggggaattgttggggaatgtgggggaaaaggttcgggaaatgtcgctgaaagaggctgtagaaacgaggtttgagaatccgaattgtttgattctgagtcagacggctgtaaaaatgcgaccgtttggcattccggaatctgattttcatttactgaatggcaggacaaagatgattacgaaaatgcctatccgtttattgactttgagtatgttggatttacataacagaaagagtttttgggatgtaggtttttgtacaggttctgtttcgatagaagctaaattgcagtttccgcatctttgggtgactgcctttgaaattcgagaagaggggcgagaattgatgaagcgaaacgctcgccgatttggcacaccggggatagaatctgtaataggtgatttcactcaacagagtttgtctgcttaccctttgccggatgctgtttttattggtgggcatggagggaaattggagcaaatactgaagatcatttctaatgttatattaccagacggagtcgttgtatgtaatgctgttactgttgaaacttttaattcgttgcaagaattggctgctaaatatggttttgatatcgggcagacaacctcaattacaatagatgaatatcaccctattcaggtggtgaaattaataaaacggaaggagacgtggcatgtttgaatttataaaacgttctttaagaacggctaaacaccatcctcagttgggtggcttggaaatattaaaatatatcggtcccggtttattggtgacggtcggttttattgatccggggaactgggcttctaatttggctgctggtgcagattatggttatgcgttgctttggatggtctcgctttcgacgattatgttgattattttgcaacacaatgtggcacatttagggattgtaacaggattatgcctatctgaggctgcaatgacatatattaaacctcgttatgctcgtccgatgttgtggacagcaatgggtgcttctgtgtcaacttcattggcagagatattgggaggagccatagctttagaaatgttgtttgatgttcctgtgagaatcggtgcggttttagtgagtatatttgttgttattatgttgtttaccaactcttataggattatagagcgttggataatagctttcgtttcgattatcggtttatcgtttatatatgaactttcattggtaaacatagaatggggagaggctgttaaggcttgggttacaccatcatttccagaggggtctatggtggtaattatgagtgtgctgggtgctgtggtgatgcctcataatctttttctgcattcggaagtaattcaaagtagacagtggaatctggaggatgaaaaagttgtgcaaaaacaattgcgctatgaattttgggatactttattgtcaatgttgattggttgggctattaatagtgctatgattttattagctgccgcaactttctttaagaatggctcttctgtgaatgaattgcaggatgcaagtgctttgttgcaacctcttttgggtaataatgctgctgttgtttttgccgttgcgttactttttgccggaattgcttcaacaattacttccggaatggctgccggttcgatttttgccggtatttacagggaatcctatgatattaaggacagccattcccgttggggtgtattattgtcgttgctagtggcattattgattattatggttgtgtcgaatccgtttatgggtttgatatattcccaaatgatattaagtattcaattgcctataaccatttttttgcaagtttacttgacctcttctgaaaaagtgatggggaaatataaaaaccgtttggtaactaaatgggtgttgtatttgttaggaatgattgtatcaggtttaaatgtcatgttgttgattagcatgatttgggagttttaaggattagaaatttagatgaaaatatcatagaattaaagcgatgaaaatagcaatattgataacttctgatgctggtgaaaatacggcgaaacggcttcaaaatgaactggataaaagtgtgatgttgttctcggtgatgctacgtgaaggatgtaacaggatagattctgtatctgcatttgttgaggcacattttaaagagtttgaggcatttgtttttatcggtgcgatgggaatatgtgtgcggtcaatagcttcttgtgtgacatctaaatatgctgatcctgctattataaatattgattcagcaggaaattatgttgtgcctgttctttctggacatgtgggtggagctaatcggttggcccttcatttggcaaggatattgggagcagaagctgtcgttacaacacaaagtgatgtggctggtttgtgggctttggatttgcttgcccgtgaatacggatggaaggaagaacacgtcttgcctatgaacgagctgattgtgcgttttgtaaatatgcagccgacagctttgttattggatattcgggatcgtgggacagaagtgcttgaaagggaatgtcctgggcatgtaactgttttttatcattttgaagatattcctgttgaaaactataaattgattattgctgtttctccttttgtttatgctgccaatttacccatattatattatcgtccggcagtattacatttgggtttgggttgtcgtaaacaaagtgaatcagagggggcgtggcagtatatttgtcagaggatgttggagtgtggatattctcccttgtctgtaaaaactgttagtacaatagaattgaaaaaagacgaacccttagtggcggatgttgctgcaaaattaggagtgattcctactatttatgcagagcaggaattacaaggaatagaagttcctaatccatcagataaggtttttgaagtgacgggtgtttatggtgttgcggaagctacggcattaaaaagcgctcataatgtaaggttacttctagaaaaacagaaagcgcaagtaaataaaggaagtgattttacttttgcaatagcaatggaggaggctgccgagcgtggaggatttgttgaaattgtaggggccggccctggagacccggagttggtgtcagtccgcggtaagcatctgttggaaaaagctgatttgatattgtatgccggtagtttagtgccaatagagttgacttattatgccaaacctggagctacagtgcgtagttctgcttccatgactttggaggagcagtttaatttaatgaaagaattttatgacagaggtttactgatagtacgtttgcatacaggagacccttgcatttatggtgccattcaagaacagatggctttctttgaccaatatggtatgcgctaccgtattactccgggaatttcatcttttttggctgccgctgctgctttgcgctctcagtttaccattcctgaaaaggtgcagagtattattctgacgcgtggggaaggacgtacacctatgccggaaaaagaaaaattgcatttattggcccgttctcaaagcacaatgtgtatttttttgagtgcttcaattgttgatgaggttcagcgtgaattgttagagtgttatcctccggaaacgccggttgcggcttgctatcatttgacttggaaggacgaaaagatttttcgagggcagttgtgtgatttagctaatattatacgagagaacaagttaacacttaccacaatgattgttgtaggggatgcaatagataatcggggtgggttatcaaagctctattctagccattttacacatatgttccgtaaaggagacgataattgataattatatgattttgatatttggagggacaacggaaggacgtgccgctgtagaggtgcttgatactgcaggacgtgagtattactattctacacgtgggtctggacagcagatagaatgttcgcatggaatccatattgttggtgctatggaggctacggccatggagtccttttgtttgcagcatgcaatccgccttttgatagatgcagcacatccatttgcagagaaattgcatcaaaatattgcatctgtatcagagaaattgcatatccctgtagtgcgttatgaacgtatctatcctcctcgtaatccgagatggatatggtgtgacacttattcagatgctgtcgattggctggaaaatcagcagataaaaaatcttctggcactttccggcgtgcagacaataccaaagttaaaggattggtggagtaaacatccgtcttggtttcgagttttaaatcggcaagaatcaatagacttggcgttgagttatggttttcccaaagaacgattggtcttttttgatgcaaatgagacagaagatcttttaatagagagcttgcaaccagatgcaatattgacaaaagaaagtggcttatctggttgttttactgctaaagaagatattgcagctgaaaaaggaattccgctaatcgtgataaaacgtccggttttatcggagtttttttatgttgtgacagggaagcaagggttgaggtatcgggttgagcgtttagtgcctggtttttttcatttgaatagcggctttacaaccggcagttgtgcatgtgctgcagcaaagtcagctttgaaaacattaatttctgacgaagaatttcaacgaatagatatcgcattgccaaatggagaagtgatagatttgccgattttccggactattcgaaatgggaatactgttacttgtagtattaaaaaggattccggagatgatcctgacattacgaatggttgcgaaatatgtgctactgtagaattagcagattctggcataacctttaaagccggtcctggagtgggaattgttactttaccgggattgggactagatattggagaaccggcgataaatattgttccgcgacaaatgatagcatcggaattagagaaagttcttcagtctgcatcccttcatcagggggtggttgtgacgatttcagtgcctggaggagaagaactagctgtcaaaacgtttaatcctaaacttgggattatgggaggaatttctattatcggaacttcagggattgtgcgcccgttttcttctgatgcgtttttagcttctattcgcaaagaaatacaagtagctaaggcattgggttgtaaacatgttgttattaattctggagcgaagagtgaaaaggtattgcatgcacgtttcccagagtttatacctcaagcatttattcattatggaaattatattggtgctacattaaatataattgaacaagagggaatagaacgggtaacgatgggaattatgataggtaaagctgtgaaattggcagaggggaatgctgatactcatagccgtaatgttgtgatgaataaagattttattgtatcattattaaaagatagtgattgtgatgaaacgatatgctctaaagtatatggcttttcattggcgcgagaattgtggaatatattgccagtgggacatccgttttatgaccttttagtgcaacgatgtgtggaagtttgttgtaagtttcttaaaaacacccagttggagataattctaattccagagttcgtttaattgtgtaagcaaattgtcgatacttctgattagcatagtttctttattgggaaattgtaaaataaaggtatcaggctcatttgtacgggtttctatgcaaatatcagcaacgatgtttcgattgcctaaaattccattgcgttgtaaagccttgcgtaccattgcatatttatatccgtgtccagttagacagacttcttgagaataattattggtaatacggaataatccggtttccatatcaaagacaatacctttacgttgaaaaaaacagctgagattgccatttaaggctaagtcttcgggagttccggtaataatgccatgattacgatccataagccatatcttgtctgcaatttgcaaagcaagctctagatcgtgcgttgataaaaagatagttttgtttgtttcgcgtgttaaattatgcaatagttgcatgatttctaccttgcttggaaagtctagaaatgcagtaggttcatccaggtaaataataggcgtttgttgtgccaaagcctttgcaatcattgctttttgtcgttctccatcgctgagggtatggagcattctttctgataaatcctgaatgttaactaatttaatggaatcatttacaataacttgatcttctttgcgtaatttaccccaaaaaccggtataaggactgcgtcccatacctactaattctctgacagtcatattgcggatatcacatttctctgtcaaaacaatactcataagagtagataaatctttatcgctatatgattgaagagatttgcccatcaattgtatttccccggataaagcaggttgaaatgctgataatgtacgtagtaatgtggatttgccgacgccattggttcctaataggcatgttagttctccactataaatctggcagtgtagacctaacgctaccgttttacagctacttttagttttatagccgattcccagattgtctaattttattgtagtgactttattcattcaattcgcttttacgtttgcggaataatactgatgcgacgataggtgctccaataagagctgtaacagaattgactggtaaggctccctcgaaacctggcatccgagctattagattgcatattaatgctaaagcagctcccattaaaatagatgcaggcattaatattcgatgatcggatgtctgaaataatattctgcacaagtgaggaacagctaatcctagaaaagcgataggaccacaataggcagttacaatagcagttaacactccggcagaagcaataactgcgattcttgctcgtcgtatatttagacctaaattacgagcatatccgtctccgagtaatagcagattcagtgtttttactaaaagtaatgatgagggcagtagtattgtcatgatgcaaataaatgtggttatttggtctccggaaactctcgaaaaactgcctaatccccaaataacataagcctttacatcttcttcaacactaaaatattttaaaataccgatgatggcattggctaaataaccgatcattacccctatgatgaggagagtgacatttccctttactcggtgagatacaagaacaattaatgccatgactgctagggctccggtaatagcagcaacagttagggcaacttctcctaaaatacctgcattacttaaggctgtccctccaatagtgccagacattaaaacaatagaggctacgccaagactggctccggaactgattcctaatacagaaggatctgccaatggatttttgaaaacagtctgcatctgtaaaccgctgatagctaatcctgctcctgcgactatagctgttaatatctgagggaatcgggatttccaaatgatgtttgtccagttaatcggagtgccctctttgcctgtcatgatgtcccacactattccaagaggtatatgtattgagcctaataccatatttaaaaatataaatatgacaatagtcaataatattgcactccaaagcaaggtgttttttatagagccgtgcataaaaattattctttcagtagatggtaataggtcggttggtaatcgggtaataattcaggatgaaacactttaataaaatcagataacagcaaatccggttccattggcatattttcgtaataggcttgctcgcgcatgttacagtagattatacccttttctttgaaagctcgaaaatcagcgtaacgagcatcttgtgctttaagtgcatcatatgaatatttgcctggataactatttagtattcgccaatattgtggcttgtcagcctggttatatactgtttcaaaatcaagattgatacctccggcccgagggtcgtctttaaatatataatcagccccggcatctttaaaaatttcagcaagaaaactcttgcctccaacagcataccatgaatttccatgaatttcaccactgagtacgatgggtctttgttttatattcttagtaagttgtttgaggttgttatatctttcttgaatgcctgtaaatattttgtctgctttttcttctttttcaataagtataccgatgagcttgatccattctgcttgtgccagcggattcatttctttataacctagatgtggaattaaaggaatgccaacttctttcattgcgtcatatcctccttgtttaaatggagatatcagtataatgtccggtgcaaggctgaatattatttctggatcgaaatctccttcaataccaatctttcgggtttgtccgttggctaattgtttttgcatttttgcatttgtaaggaagcgggtactactgattcctacgactttgtctgtagcttctaagcgaatgaaattagatagttgcagcgaagtcatacagataaggcggttgattggcaaatcaattatttcaatattttggggaatgtctggagtagttccctgtttgcgcaatgcaaaagtgtattctatactatttgtattttgcggatcttttatatgcagtaatttatatccgttacattgttctagccaaaaacctttggcatatagaatgccttctattcgtgacgaatcgttatagactgttttatctttagtcttatctgatttacacgcagaaaaattgatactacagactgagatgaagaacaataaaatgcagatacattttttcatactcttttcctccgaaagataaagttgttatgtaaattaatataaaatgtcagcaggttttctggcttgtcgtcttttttcccttcccggtaattcttttccagtgggttgttttaaaaagacctgtcgataacagtattgactttacagctgcggggacagctccggaatttcaccggattcccttccctaaatggggatgtcactaacacacatgcaaagataatattaattttgttggcttgaatttttttatgaaatttgtaatccaatcaatacaatatagtgatggaagcaacagaaagaattataggagtgtctttgggacccggagacccagagctaataactctgaaaggtttgaatgcacttcagcaagctgatgttattttttgcccagcaacgaatgttgcgggaggtgaaactaaatctagggctttggatatattgaaagctttacctgtcgaaccaactaaaatacaattgtatcaaattccaatgtcacaatcccgtacagaggcaattgttgcttatgataatgttttcgagcagatagtatcctttgttgccgaatacaaaacagttgctcttgttgctgaaggtgatgcttgcttctattcttctgtcaattatttatatgagaaattagatcgagcaggattccctataaaaatggttgccggagtaccggcatttatagctgcatcctcttctattggcttgcatctggtgaaacagcaagaacgcatggtcgtaattccaggagacgtcttggttgacgagctgttggagtcggttgtgttgaagcgtacacttgttattatgaaagtatctttgggagaggcgattttgcgtccttttataattcgccatccggaattggagttccattattttgagaatataggtacacctaaagaatatcgaacttctaaggttgatgagattcttgctaggccatttatctacttttcagttttgattgttcgaactaaagagtaggtagatagagaatatatagcatttatttaggaacagtatattgacaaataagttgataacaatcatttgcatcgaaatgacggtcatttgcataaacttctgccatgattttccaccaagcttttttgcccggtaatcgttcgaaattcttgcagccggtcttcatatcaatgttggtaagatgtattcgatttaaatcaataatctcaacctttacaccctcttgggattctttaaatagaatattgccacgagagtaatctttatgtaagtaaccatgttcgtgcattgctgcagttgtatgggcaatagctcgaagaattttgtcttcgttggggaaattgtttttcgtcaaatcgtagtatgtatatggacattctgattttaggctgatataataacttttgccaaatagaaatccatttctttctgtataatagccgataggttgtggagtcccaatgttgcttttttgaagcatttgtgcatattcgtatgaacgtttggctttagaagaacgtaataggccgtatgcaatcctgtttatgatatttggtatgcggaatgcttttacaactaattctgtatcatttattttaaattcacgtaattcatttcgtcctttgtaaatgattttcccattgttgttacgaaaatgtataggtaaagtctttatgaaatcgtgcaaatactgataattgggatgcacatatgcttggcgaggatgtagtactcggtatattttattgattaattttgagtatgttctttggtagcgtagtggtcctccaagttctctttcaaaaaattccggatgacgtaaatttaatgtcttgataacatgcgcctttaacttacgatctgatatacgtttagagccactacgtattcgatagtataattctatttcaggcaagcggacaactttgcctccattttttaatattgaaatccagaactcccaatcttcacgtgcgataatttcttcacaatatccaccagtttgttcccaatcagattttctataaagcgcacaggtatccatcatatttttgcgtgctagcaattttagagagaagggaggtaatttccattctccatctgcatctccgataaattgtgctcgtggacaaaccactttaatatctgcatctttctcaatttcagttacagcatgactgataaaggaggcagagatgcggttgtctgcatcaaccggtaaaatgtaaataccctgtgctaatgaaattgcatgatttcttgctgcacaagcccctgcattaggttgagaatgaacttgaacccgtttgtctcgttttgcaaatttttgtgcaatgcttaaagaagaatccttagaaccgtcatccatgacaattacttcgaaattcggataatcagaagtaatgatagagtctaatgtttcagccagatatttttccatgttatacactggcactataacagaaactagaggtaattgttccatgagcttttccttgatttcgttgctttttttttacaattataggtgacgacaactgtaaaaatattcataacgtttttatttagtacagattttctattttatcaggttgtagcttgcgatagaaaaccattcgttcgtagcatttcttagcatcaaatcctcggacttttgcatattcttctgacataatatggtgcatgtgaggtgttgcgggtaggcgttcgaaatttttgcaaccagtattcatgtctatttttgcaaagcgaatgcgatttaaatcaataatttctacctttacttcttcatctgattctttaaataggatattgccgcgcgaataatctttatgtaaataaccatgttcgtgcattgctgcagttgtacgggcaatagctcgaagaattttgtcttcgttggggaaattgtttttcgtcaaatcgtagtatgtatatggacattctgattttaggctgatataataacttttgccaaataggaacccattcctttctgtataatagccgataggttgtggagtcccaatgttgcttttttgaaacatttgtgcatatttatatgaacgtttggctttagaagaacgtaataggccgtatgcaatcctgtttatgatatttggtatgcggaatgcttttacaactaattctgtatcatttattttaaattcacgtaattcatttcgtcctttgtaaatgattttcccattgttgttacgaaaatgtataggtaaagtctttatgaaatcgtgtaaatactgataattgggatgcacatatgcttggcgaggatgtagtactcggtatattttattgattaattttgagtatgttctttggtagtgtagtggtcctccaagttctctttcaaaaaaattcggatgctgtttgttcaaatagttgatgatttcttttttttgttgtcggtctgtaatccgtttggatgttttacgtatccgataatacatagaaagtctggatagggagacaactttaccaccattttttaatacagaaatccaaaatatccaatcttcgcgggctgtgatatcttttgtatatccgccagatttttcccaatcttttttacgatataaggagcagattggaatcatatttttgcgtgctaataggttgagtgaatatggagctaatttccattctcctgtgcgctcccccataaattcaacttttgggcggactacttttatctcgttgtctgccataattgcttttactgcgtcgctgataaaatttgaacacataatatcatcagcatcgaagggaagtataaactctcctgatgctaatgatatagcatgattgcgggcagcacaaactcccgcattaggttgagaataaacttgaacccgtttgtctcgttttgcaaattcctgtgcaatgctcaaggatgaatccttagaaccatcattcatgacaattacttcgaaatttggataatcagatgttagtacagagtccaatgtttctgccagatatttttctatattatatacgggcactataaccgaaaccaaaggtaattgttccatgagcaaatagtttttattaaatatagaaatatcgtctctactatagagacgatattcacaaggcaaatataagaaatgttttaattgtttgccaaaattgcctcattatgcataactattttaaattgtagaagaatagccatggattttctcctgtttttactttgctgaatagtgttttcattttatcagtaagttgcactccttttgcttccaattcggcttttatttccaataattcttccggagtaaagatggctatcaatttttctccttgttgtccccataaatcactgggataaatcatatctccccgggccggtaaatctttggggatatagtaacctttctgttgatttttttcatagaagattttaccgttatcgtaggtgatgataaaccaatttttggtttcaaacacttctttctttgcatagaaacctttttcttttaatttggccaatagactccaataatctactcttgtaggagtgaagtttgtaggtacagagcgatgtgtggtggtgataaaacgagggataaacttgttgtttgcatatgcataaattgtatcgcttagaggtgcaatgcaggtgatggtattcttataaattgcaataggatgaatagagaagtctgcataacccatattgaaagtgacaatatgctgtctcaacgtgtcaaatttattaaaattttcgtctgttgtgaagtaacacattttgtttcccgttccgcatgcacaatagccgatatatttaccattaccgatggggtatatttggcgagtgtagaatgctggcattttggttttccctgttgaaatatatttgccgtttaaatcataagtcacttttttatgagagctgaagccatcatgtaatgtgatttgttttttatccaaatctacccaaggtagtcctaaagccccatgttcttgttcgcctgaaccatatttacctactctatgcatgaaatcacctgttaatttgaattgcatcattctcatttctccgtcatggtagtcttttataaacaggtaatcaccataaatataacatgtttcgatagagccgagttggctgttatcgctgttttctaatggtacataattccaggttccgattagtttgtcccagtctgctgccgttttcaggtctgtaacatttttttcatttaagataacgggtttttgctgagctttcatttgttcccaagagcctatgaaggctagtaaaataataatccacttcatctgattcttttttttgtatgaataatgttatttgatgcgttctaataatagttcgtagtgtatgcgcccttcttgttctgaatgcttttcttgtaacatttttaactgtcctttgaggtattgaagttcttgtgcaatcgagacaatatagttgcatgtattttggtcggatgtattttgtagtatggaaatcaaggaatctatataaagagcttgcatctccatttgatatgcagtggggatatgtttagcatcaaattggtaccatattttattatgtaatttatcccaaatagttgacttttgttgcccaaaggcatcaattgattgttgttggaataggtttttgaatacttcttttccgatgttgtttatgattttctggtagcttgtccgattgctggagtatagtgtaggaatgtcaagccaatgatgtttttcttggaatatatagtaatcaagtatggctaaaattctttctgcgttttctggtgaaagaatacaggctaattttttcagataattcgttagatttttaattccttgattatatagaattgtatattgctgacttgttccatgcagagcaacttctgtttttaaaaatgaaaacattgcctcgtggtttttgagcttgcgggtcagtatcttttctttttgtattttttcttctgtgcttgttggtttgtcgggaagaatgattttttccaatagcttgcgttcttttatggcatctttataagctgtggtttgttgatagccccaagcgatttgtttgcaatcttgttgagtggggacattactgtttttcccattattaagttcttgtagaacggaatctttccaatagttctcagaagatggagcagttaaacccaatgccagaccaaattcacgcataatgattgtttgtaatatttcgcctgcaacttgttcgtgtaggatgtttttgcgtatgcgtttatcctcgtttccatattcccaccaatagttgtttaaatagggcaatagtagtccatggcccaggttgaggcgggtatataggatctcccctgtttcaggatgggtgatttgttgtcgggtagttgttgccggtcctaggtcgtatgaaatcacaaaacgatggagtgccggaatttcgtcttgggtgttttcgtgtatttttatggcatttttaataccagcctgctcaaatgccttgttccaggcaaggaccccttttttgatatatgaagcccaggttggaggacagagaggatctatacagcatatcaatggcttgcgggaatggaggcgccaacggcaaatgatggtatcttctaccgctccataagggatgcgtccataatctttgaatgtcagataggtgtatgggaaatgatggttggcatagcgcaaaccgagaggctttgcatccaatagcctgattgtacaactgatttgcatttcaattgtcgagttaagcttgctttgtatacggtattcctgtttgaatgcgacatatattccatcatcaaatgtgataatggtgtctgcgccagtctgttttcctgtcaaggggaataaatcctgcatttgaagttgataccagttttctccgttcagaatagctttcgtgatatcaattgcataaaagccatccttattgatattgtttataatgggataatctatacctaaaggttgacggttggatgcttcaaaggcaggtcctaattcgctgttcccggttgttatcctttcctcgaatctttctttgttgaaaaagattttgtttccgtttgccgatttttgcaggcggactacccctatgcttgctagcgggcggttcctgagcccaaagccttcatttgcctgtgctgtaatcaacaactccttccctattgcagattcgggtatgttcaatattatttttccgtcttgaacagtcgcgcttaacttctgtattaatgtttgtaccgggtgttgtcgggaatgtgatgttatggggttcaatgcatgtccccatgtgcagattcccagtaaaagatataatattaatagcctttttgttttcatgtttagtttattttcccatgctgaattttatgtagtctgctattcgctggccatgttgaggattgaagtgtttttgtcttgcttcatcgagaatattctctaattcgcatctccaaagcattttcatatattgtgaatcagaatttttcatcgcatccagaacgcttttgcaaaatacttcctgtagaatcttgcgtgacctgtctgtttgatgtccgtcaaaaattgtttgatgtaacgctgtgatatactctttgatagaaattgtattattgggatatcgctctgagttgttttgaatatactcgcatcgctgtattagcgaacggataatttcctggtaaaacgaggatgtccttcggtgattgccaaataaccattccggtgaagagaatgcatatttgtttatgaattttatggcatccaattgctttcggattggtataggttgttgtgtcagggtattgatgcctccgatatataatatggcttgtgtcaaaaagttgttgtattgtatttccatccagctttgtctattcatccatatttgtctgtttgcccattctccggaacgccaaagggtttcattcgactttatgtattttagattttcgataccgagtgcattggctgccaacaagtcgttgcttaagtcttcagactggacttcggggtcgataccggaattgttggcaaatctcaattctcgttgttcttgttgttgagttacccattcttttaatagactgtctgaatttgcatgatgtctgtaataacggtagccccattcaatagcaaagcagtcatatatcccaacattgggggatagaagtttgcagtccattttatcttccggttgggcaatgtagttgaaacgtgtataatccataatggaaggtgtggttccgtgtttggcaacaaaatcaggattgcgtaattgctctatggtataggcgctactgctgatgaaattgtggcacaagcctaatgaatggcctacttcatgggtaacaacaaacttggcaatccttgctaataatgtgtccggaatgatttcttcatgtatgcgtgggtcgatttgtgcacattggcaataataccattgttgaattaaatccaggaaactgtggaaaatagatacccgtccactaaggatttctccgctgcgaggatctgtgatgatgcctccacgggcattcatgcgcggagaaacattgtatgatatgattgaaatacgagggtcatcaattgaaaaatccggatcacttttatgagtaggcatcaattctcctttgattgcgtttttgaaccctgcttgctcaaatgctttttgccaactgtctacagcttcgatgaaagcttgttgtagatatttgggggtttgcctgtcaatatagaaaataatgggttttagtggttctacaagttccccggcttcataacgttcaaaatcttcaggacgaggttccagacgccatcttttggcaactttgattgttgtggtgtatacgttgttgtcacactttgggtaggtattcgaaaaatattctactcgaggatcccatttgcgaaatgaaagaggtgtatggggtaataaagtgagagcagttcctacttgccacattgtcagctcgcgtacgttcattgcgttgggaatctctgagggtattctggaaggttcgtaagctctttgcaatcggatgaacaggatatcttcccggttgctgccgatttccagaatggaggaaaattcaggatgacagatactgatgttaaaatctcttccataacgtaatgccaggccggtaaaaagagtttcctgattcagcagattgctgacatcgattaatacagcttcgggtttctcttccaaaattggaatggaaaggtatagcccggagttgtttttttgtctgtaaagtgaagttaattcacagtcttgcgggaaatctgatatgccattaaaaacttcaaggcaattgattctgtttctggatttgacaaatcggatgacaccttcttcaaccatgtcattcgcaaatccatataatccgtctgtcggacgttctgcctgagctgcagctttcagtgctgtttttgttaccaatatatcggcaccaagcagtctgaccggaatttcccaataatatttatcggaatgtgtataggtagtaaacattcccggatatatatttacggtatcttgtgggaatgttttttttaagtagtttttgaaatgcccttgggcaaatgcccccggtgttgtcaccaggagcataattaaaagtttactgccaccacttgcaagcaaatgtataggcaatgtcaacaatctcgccaaaaccgtcatattcatatactttagggtttttctcgtcatctttttctacatttccgctggcggccagataaatctccgtgacagaccatttgcctcctttttcaactgccagtcccaatgttcgggtttgttgtaacgaagtttcagcttcatcgtctccatccgtatctaccatgctgtcaacatttgcatggcggaatttcattacatggatgcgtgcgcttgcatcaggatgttcgtaaatcaggatggtcttgggggtactacgattcaaatcgacccgatatactttgttgcccgatgcataaaagaagatgtttttaaaggcgcttgaaacggcaatatgtgcatcttctgcattgccattcagttcgcaggtcttttctgcaaggcagaagcaggtatctctcttggttgcagacgaattgctgaaatcaaaaacatgtacttttccgtcttgctcgttgtgggtaaatgctacaacattcccgtcataccaattatccatgaacaagagtttgtggttttcatctagtttcggagaaaatttattgggttttccttcgcttgcataatccggcacattttggatagcaatgtttacaaattgattatagatggtctctcccatttgaggcattttacgatacagtgctccggcaccagtgtaaacatagggattactatacaagaattgtttattttgatcatcgaatgccaataaatgatagctgttggcgctgttaaatgccaccgcattgataatgttcgcactttcaatatctttggtcaattttcctttgaaatacatatacgaaccatcttcagccgagaaatacaattcaccgttgttggtgataacctctccgtactgatatgtgtgtgctgattggatggcatcttcagccgggaccggatacaatgaattggaatagtcgtatattttttcctgaaggtgtttgctgtcgtaaatagcctcgtcagtgtttgtcaatacttgcagcctccattctgagggattccatgagctttggtctttccaaaaacaataatttaatgccttgggggttcctgtaagcgacatcggctgtccgtatttgctctggaatacatcaggcgtgattaatggctcttcaccgggagcttcaatgctgcccaataccggcttgcctccaatattctgcaatacaaaccagttgtcttcaaatggtatcagaatcttgattgtaaattcccggtatgttgtaatacccaattcgttgtccgttactccaaaacggaagaaagtgttttttgtatcggcttttacataataaaccagagtgtcggatgtgctgtaaatatcccatacggttgaataatccctttccgtccggatgcgccattcaaatgacagatcattacgggttctgccttcgggtaaagtgatttctggagcaatctttactaggatggagtcattggcattttccggtgcctgcaatgctttctgggtatccattttcaggacaagctcgttcagttctgaataattctgttcgatattgtcatccacacaggaggcgaaaagaaggcttcctaatatgcccagtatggttttgattatcatatggtatcttttcatgggttctattcgttaacgtttataaattcgatttcctttgccggagtgctgtcatccatgatagggggattgccggcagccttgtattcctgataggcattgtagatttcttcctgttcttgccaatatggaggaatgtcggcatgaagtttttgaaagtggtctatcatgaatttatattttccgttgctgaattttccccaggcatcagcgttccatccgatagggagaagcgtgtacatacagtcgatgatacattgttgagcctctttattgcccggttcaaaaatgcctgtgtttttggattggtcaaattggatataggttttgttggcctttccgaaattatcgggggctttgactgtgaatttgataaaagtgctgtacgtattcttggggataatatatgattcggcaacagttaccggcatgctgtatagagagtctgccggagctgtcgtgcaatagaatgtgcggtccgtatttgtggaaagtcccattacaacgacttcaatggaatcggtgatttcggttgttttatttaaatagtcgctgtcagtaaagtcgcatattattgtcggaacatttttcactttatagtcattgttgaagtttagtcgtgctccggatacgtattcttccacctcttctttttggcaggcggagaatataaagagcagtgaaaatataagcgatatatttcgtttcatggctgtatggttaattgttgtttccaaatatatgttcattgtcagggattgcaggagtatagtattgtgggagcatgccgccggcaggacatcctgtaaatactttataattcagtcgtttatagagatagaataattgtccttcgccgtagtattccttgctgtattccttcatgatttcattgatgcgtttggtttgggtattgtcacatcccggacgtgaatccaattggtcgaatgcatcgtcaccgaccagatcaacgtctgccggaatccccctgtttgcccggaccgtattcagccagtcggccgcttccgtcgggtcggtggcacattctgccaggatgtagtacatttccggaagacggatcagcggcatggaattcttgcctccgctccgtaacggatcatcgtaaccttgctggtcaaattttctggatactttgactgtattaactaattcgaaagaattgttgtttatgcggaaatcggtggcacccccattttcaacttcataaagtttgtcaagagtttccggcttttcagacatgttggatgatgaaatattcttgaaatcttcgtctacaattttatccaactcgtcaatgtagaggttgaagatatgttcctggaataatatgcggttggaattacttccggcgaggctgaaatagcctgaattgataacgtcagatgcatagttgtaggcccgggatttgctgtcggcatctcctttgtataggtatgcacgtgccaatagggcatagacagcatagatattcatacgggtttggcgatagaccaagaacgggtctcttgtctcattgtcatagtcactgccgaattctttcgggtcatgttcctctaacagtttttcagcttcatgtaaatctgctattaccaaatcaatgaattgagatgcaggcaataacggggtggcttctgcatccaaacgagtacggtatgccagacattttgtttccggactttgtgaatatatcggtccgaataagcgcaatagttcaaaatgcaggaatccgcgtaaccccaaagcttcgcccttcattacctcatagtaatcaggagtcttgattacatcccggttggcatcaatgtagtaaagaaaattattgatattggcaatgactttgtaaatcatgctataatagttctctacgattgttttgtatgaaccgctgtaattatacagttcattatccattatcactttgttttcgtagcgttgggccaggaattccatgaagttgtatgtgaactgcttgccatacaatgagggctcgcctaatttcaaataaaaaccggtgagtacgtccttgaacccatactcatgtgcatataaatcttcctcattgatagaggtcttgggtggtacatccagccagtttgagcaggacgtgaaaaagaataataagctgatgaccggagtcgatatcaatatttttttcatgattctattcattaaaatgcaacattcaaagaaaatgagaactgacgggcaaacggataatccagaccgcgttcacgttttacagaagaaatataggcaacatcctccatgttgagactcatgctcaatgcgctcatcttcatctttttcaagaaaggatgggaagcggggaaacggtagctaagagcaatggaactgaactggaacgtgttgtcatccatgacaaagcgtgaggtcgcttttgtttcagagccttttactgcattggtaagggctttgtattttacgacatctcccggtttttgccagcgtaaatccaaaacgcgtctgtccgcattataacgcaagtctgcattttcgactttagataccagagtgttgttatagacttgtccgccaaatcgatagttgaatccaacactgacaccgaagcctttatagttgaatgtggagtagatgtttccctgtaatttgggttcggtgttgccgtaaggaatgacatctacggcatcccatacaccggtcagttctcctgtgatacgtttctggaatacttcctggccggttgccgggtcgatgcctaatgatttgacaacccagatgttgtttaatgactggccttcttcgtagcggggcagtggagttgcatccaattttccggcattgacactgttcatgtattccaaagcatttgaaatctttgtcattttgtcacggttgtgcgagccgttgaagttgattatccaataggcttcacgggaagcgtctttgtaggggatgaatgatgctgcaacctcaacgcctttgttctcaattgttcccagattttccggtattgatgagaaaccgagagacggtgccaatgttatatcggtcagggagtttttggtgcgtttctgatagtattcgacttttgcagtgattctgttgtttaggaatccggcttccagagcaatgttcaactgtccggtctgttgccatttaagattggaattacccagagcaacaagttctgcacctgttccgtcggatgaaatataaggtttcagcatagagtatgtgtatacttgttgggcttggtagggggcaaaaccttgtgtaccggtaataccgtaagaagctcgtgcaatcaggtcgcttatccatgatattttttctatcgttttttctttcttgatgtcccagcgtacacctgccgaccagaacggagcaaaacggttatgtttgccgaattgggaggaaccgtctgcacggatattgaagtcaacggaatatttgtagcggaatgagtagccgaaggctccgacaaaaccgattgaacggctggtgttttcgcttccggtcattttttcattgtattttttaccgaaaaggatgttgtccatttgatcgttggggaaaccggttacggttgcaccgtaccaatcgtccgatgtctgatctatggaataacgggcgttgaaacttacaaaatgatctgctgcaattacatcattgtaggatgcagatatgtttatattgtaattgaaagattcgtcttgctgacggatgaattctccgcggcgcataggatctgcttctgaaatgaacttggtgtgttgtgccggacggaatatttctgtctttccgttgcttttggcgatggcaacatcagcctgtaggcgtacggaggaaacaggattgtattccaaatagaattggtcacgtacagtaaaagaggaattcctgtctttagagttgaaagtggtgttgtacatggggttcggtatggggtctgtattccagtattctttgggattttgccatacctgcaggttcttcttgatttctccgttttctccgtaaggacgcaaataaggattcaaacgggtgtattcgctgaatgaaccccatggagaattgtctccggttgcattgtccagggtgatgttattgcgtattaataatttgttgaagcgatagctcaggtctaaagctgccgtttgtgtcttgcgggttgattccttcataacgcccggagtgaagttgccgccgacatacaatttgtagcgcagtgccctgtctcctccttcaagggttacggcatggcggtgctgtacggcatttcttaaaggaatatccagccagtctgtatttacccctcgtctgacttccctgagatattgctgataaatctgtacgtatgagtaatcgctgtcttcaggataataacctgccatcttttcaactctcagtttttcttctgcatttaataaatcatatcctgataaatcgggtagttccaaacggatattaccggcataggtgattcgtaagtctcctggcaggggagctttggtttcaatgactatgacaccattggctgccttggaaccgtaaatggctgttgctgctgcgtcttttaaaagtgtaatgctttctacgcgttccgggtctaaatcgaccattgtttgtaaatcgatttcaaaaccgtccaaaatcaatagtggttgattgggatatgtggaataatctccttgtagcataaccatgtcggtgcttacactgccacctccaactcctgtcggaagtgtggcctggccgcgcatacgtaagtcaggaagacgattgggatcagaaccttgtgcgatattttccataatacggaagctgggatctatgattgacagagctttggccatgttagtggtgctgaatttctttaaatcctctcctttgacagaaactgcagaaccggtaaatccttcttttttgcggtcaaacataccggttacaaccacagcatccatttcaacggcttcttcttccattttaacggtaatctctttttgaccggcataggtaaattcctgtgatttcataccgataaaggagaattgcagtatgataccttgggtgtttggtatttcaaatttaaatgttccgtccgcgccggttgaagtccccagggtagtcccttttacaatgacggtgacacccggaaggggattgcccttggaatcaacaactttaccctgtatgactttggcttgttccgctgtcttttgttgcacaggggcttttttcagcagaatggttttctctgtaatctcgtaagagaggccggtgcctgccaatagggagttgagcacttcttctatggaagcatcatgaaagttcaagtctttcactcctgtccggggcaaatcccagtcgctgtatacgaaactgaattcagactgacgaccgatttcattgataacatctttgaaactgccgtttttcacctccaggtttagtttgacctgctgtgagtaaacgctggcattagcttgtaatgtcaacaaaagcaagaaaataaaaaatgtcttcatcaccagataatgaatgatttttctacaccccggataagggtataaagattttttttccataattttgtatttaagattcaacttgcgttcgtgaactgctgcgaacagttatgaacatttatctatggggatggtactgcgaataccgtccctgttttattttactataatcgtattcccttttatgtcaaaatctactcttccggttttttgcattaattccaggacaccgtcaatcttttcatgtttccgaatattgagggtgaacggaatctgtttggtgtggctgttgctatagaacacctcaaatgaataccagcgtttcaaatcgcgcaatatttcttccaatgggcaattgtcgtataacattttaccgtccttccaaccggtgtatagctccgtatccacctgtttgattgccagattttgggtgcttttgtcaaaaaggcctggtgggatggagtcaggcgaacgtttttttgtgtgccttgtacttctacactgccggataccaacgttgtgaaaattgaattttcttcttggtatgagcgcactccgaaggaggttcccaataccttgacgttgatgtcgtctgtacgtataataaacggttttgacgcattgtgtgttacctcaaaataagcctcaccgcttaattctacgatacgtttgtcttctgaaaatcgggtcgggaattttaattttgtttctgcgttcagccacacctctgtgccgtccgataaggtgagatggtattcgccgccttgtggcacccatactgtgttgtccaatcttgccgtctgttgccgtttgttgctgtcaatggcatgtatctgcaaatgtccgatggaatcctgttgaatcagattgccttcgggcgtggtgatgtatctgcgagcctgttctgtcaaggatattttttctccgtttgccaatgtcagaatggctttggacgaaccggcttctccaaatgtcgggattggggttgttgtttcagtgttgtgagtgttccataataagatacttccaaccattgccacaacgatagcggcgacacttgccaatctccatgcattccttttaaaacgttggatgtggatttgtctgtggaggcgcttgtgtattgtgtcctgcgtctgtcggggtgtattgcagtcctctgccaattctatgcaggcatataattggagtatcttttgatagtaggcttgatgtccgggatcagccttcagccaatcaagcagctctttttgttgcgagggagataattcacccctgcgaaaaagcagtatatattcgtctatgacttcttgtgataacataaatcagtttgtttctttatgaatagaaacagatgattttgaaaacgggtgacagttttgggaaattattttcaattttttgcaataataattttctcctgcaattctcccgttgccgtccgacttatttcctgcacaaatataggacaaaactatatcaaagataacaatctgttatctttgtcttatagttgtgttatatttgatatatgtttgagatgtatttgagtgggaggaaagagggcgaagtgagggagcaaatgaggggataatgaggcaaatatacgcctgatggcttgtgagtggcagggggataattattttaagagaaagtataggaaaagattgaaattgccggcgtggcgttctcttaattggctgatagccctgcgtagcaaggtcttgacggtattgatggagatgccaagatggtcggcaacgtcctgatacttttcttttttatagaaaacggcttttacgacttcgcgggtttggggtggcatgttttcaatgtcctgcctgattcgtgtgaatatctgttcgttgggttcggagtattcctcttcttcgattgtgatattatgcagttctgcactgctgcgtaggacatctttcttttcccaaaagttgatgcaggcatttttaaccgcacgtaacagccagtgtctgacttcatcatcgggtattttctgccaggcttcggatttccagaaattatagaatacctcttgtataatgtcctctgcatcactctttgaatagacaaaagtcagagcatacagcaacatcggttgtgagtatttataatataacaggtcgaatgtttttgtgtccatgccgttagggcgataaatgttttcgcaatattcacgattttttttgatattaacaaaaaaaatcgtatattcgtatagtggacaatttaaactaagtttgtatgagaaaattaaaggactttctaaagattgctttggtcggtgtgattatgtttgccggggcaccggaggttcgggcggaggattcttttgtgatggcatctgatagtgtcgggaatcctgttccggatactgtgtttttggggtttgaaggagatttatatgattcggaggtgatttggggacatcaggatatttataagccggcttatatccgtatggcgcgtcgtttgacgtttgaagacaattgtttgaaatgggatttttccagtgcggaagaagtgcgagtctctcaaaatatttttgattatgtgacaggaatctggatgcgccagaatgccaaattggcgagcggtgattatgttctcatccctgagggtatttattttagggtagagccaaaaaggcatcctgattatccttctgatttaaaaactatcttgcagaacatgactgccgtcaaaacttcgcgtgatagggtaaaaagttatattgatggaaacacctatattgatttggatgtgatgcagttggcaaaggatattgcagggcaggaactcaaaggtttggctactgccgataatctggcaaaaatgaaagctgctctgtatcggttttatcggaatgtgaaactgaaagacggacagtaccattgtagtttgtcaaaagctgcggatattaatgtttcggaaggtgtttttaaagctctgttgaaaaatttggaggatatgaatattgccattaaaaaggcaaaggaaaaaggaattaaaatggatattcccgaggtgacagaggggtatttgtattccttattgaaaatgtgatattgatgccgacagacttgtttttattgatgtgggaaacaaattatcggcactattttgaattagtgccgataatttgttatatttgcgacatgaaacggatatgatatgaataacgaaacaatctctgccatactgagatttgccgaaaagcatcatgactttaatatagaagatttgtttgagagtctctgtaagagtatggacatcaatagatcttccctgctgtggcatttgttcaaactcgtaaataataatgtacttatcagaacaggtcgcggaatgtatgccaaagtgacaaaaccgatattttcgccccaacctgcaggtgatataatagaggtgtttaatctgttgcagtccaattttccgtttgccaagttctgtatctaccaaggtgaaatcatttcacccctgcaacaccatctttcatccaaccgcataatttatgtggaaacggagagggattcggccgagactatttttgattttctgaaaggcgaaggtcgaccggtttttttgcgtcccagtaaagatatagtatatcgctatgtggatatggacagcaggaccatcttcgtaaagaaccttgtttctgaagctccgttgcaggaagtatccggcattccaatgcccacattggaaaaacttttggtagatattctgagagattctgatttcttctatctgcaagggagtgaaagcgaatgtatcatagagaatgccttcaaaatgtattccgttaaccgtagccgtctgttcagatattccaacagaagaaaagtcaaagatggattattgtccatcctgaataacttgaatttacaatgataaaaaaagagtgttttacgaaagaatggattgaccgggtgtccactgaactgcattacaatgacaagaacctgattgaaaaagtcatccgtgcgctgtctttgcttgagatgttggtcaaagcaggatgtcctttggttttcaagggaggcacatcattaatgcttataatcggcaagtctgtccaccgtctgtccatagacattgatgtaatctgtcctccaggaacaaacataagaagattatctgaaagaattcgttgatttcggtttcattgatttggagcttgtagaacgcaaacagagaaatgatgcaaatattcccaagagccactccaagttcttttataaaatagcatatcggaatgataccgaagcccagtcgtatatcctgttggatgtactgtatgaagacatccattattcccggactcaacaggttgccatagacagtccctttatatctattgacggtgctccgttaatggtaactgttccgtcggcagatgatattctcggcgacaaactgacggcttttgccccgaacacaatcggaataccttactataaaaacgacaaatcctgctctatggagatagccaagcaactgtttgatattggccgattgtttgaaaatatcactgatttgcagataacctcgactgctttccataagattgcgcaagtggaattgtcatatcgatctttgggtgctgacgtaggacaagtttttaacgacatccgtcagactgcactctgtatatctacacgcggtaaagccggagaaggagatttcggtttgatacaggacggtattatacgggtaaaatcattcatgtacaaacagcgttatacgattgagaatgccattgtcgattctgcaagggcagcctatctggccacactgattgaaaaagggattcctcaaattgaaccttattcaaataatcctgctgacgtaaaagacatggtaatcagaccttctttgagcaacaaactgaataaattgaaagctaattcaccggaagcgttttactattgggcaaaaacaagtgagagtttaggtgattgtaagtaagtaaataattccatgtccattccggatgaatcgtaacaattctgtagcgctgatcatctttatagtaaggattgctgcatatcatcgctttctggtggcggaaagcggtgtatgcagccgcacggaacgcaagccttataaaaaatattcagtattgtatgttatcagaaccaatatatataagccagggtgcttatgctgatgacaacccatagaagtatgccctggataagcggtttgatgccgacagctttcaatacatcccgagaaagggaggctcctataaagaaaagagtgatggtgagtgttttacgggcaaattcgttaatcgatgcaccgataactgctccggtctctgttgagtcaagcacgtatgtattgaaaatcatggcaagaatgaagaagaagataaaccaagggatgctgatacgttgtcctttgtttttgaagataaaggaagtgaagagtgcgatagggataatccagagtgcacgtgtcagtttgatagtggtggctattcgtagggcttcttctccgtatgcggcaccggcacctacaacagaactggtgtcatggatggcaatggcagcccaggtaccgaaatcttgttggctcatattcaaagcatgtcctattgcggggaatatgaatagagcaatggcattgaggataaatatggtgcctaaagcgacagacatgtcgctgtctttggcttttaaaaccggtccgacagcagcgatggcactgccgccacaaatggctgtgccggagctgatgaggtaagttgtgtcgcggttgatttttaagatgtgtcgaccgataacccaaccgatgagcaaagtgccgattacagatatgatagtgaactccatgccctcttttcccgaagcaagcgaagcatggaggttcatgccgaatcccagtcctacgacggaatattgcagaagatatttggatactttcttgttgaaagtcgggtaagcctgcccgcataaaagagcgaatgcaagtcctagaaaaagagctacaggcggtgtcacccaacttgtcaggtggtgcattcccggtatgtagtcaatgagaagaaatacgcttaagatggagagggttacgatgtaaatggttttgctgtttttttgtaaagctgttttcatgttgttgtatttttcgtgtttttccatgggcaaatttatgatgtgattataatatatcataatagataatattcatatgctataactaataattataggtattgagatatactataatgattttgtcattatatttgtctctaactaaaattgatggttatggaatttcttgctgaatacaattttaccggactagtaataggagtcgctacatttcttattatcgggttgtttcatccgcttgttattaaaggggaatattattttggagttggttgttggtggttttttctgataatgggaattctggctgttgttgcgtcggtccttgtttatcatattttatggtctacattattggcagtttggggagcttcatctttttggtcaattggagagttgtttgaacaacgcaaacgagtagaaaaaggttggttcccggctaaccccaagcgaaaagagaaataatgtggggttggaataaaaaaaagaattatatttgactggcgcattgttgtttattggcctttataatgatgcgttttaaagagtaataatgcaaaatgtttagtgatgaagaaaaatttattgttagtcatgcttttttgcgtttcatttgtttttgcgcagaaggcagatttccggaaaggcgataagttttcggaagagaatttaaaacggtattgtccggctttgggtatttatccttcgtggataccgaaaacaggaatgttctggtataattatatgacggatgagggattgaaatattatattgtcgaccccggaaaaaaaacgaaacgcgagatgttttccacagaagatatgactgcatggttgacggagaaagttgggaaaacatacagtgtcagggacttccgtctgagtactttgacttttgaggagggtgatgcgaattgttttacttttttgaaagagggacggaaattccggtattttatagatgagaaaagattggaggaggtagaggaaactgagacttgtcattttttccctcagcgaggaccggtatggcagtcgtggtctgctgacagtagctgtaaggtatatgcttggcgacatgatttgtatttattaagaggtgaagataccatccggttgacgactgatggtgagaggggattttcatatagtgtcgtgagggataaagattccgacagtaaaacgactccggcaatttcatgggtcggtaatgaaaatatattttatgtattaagacaagacagacggaatgtgaaggagctttgggtgatcgatcatttggcaagaccgcgtcctaaattgaaggcgtataagtttccgatgccgggggaaaaggatgtttatacgtatgatttacagctgttttatcccctgacgggaaaaaggatatctgtggatattgataagtatccggatcaggaggtaaacatcatctcatcggatttggaaaagtatccggatgatttgtattttacccgtaaaagccgtacgtgtgacagcatggatttatgccgggttaatacgcgtacgggcgaagtgacggtggtgataagcgaaagttcaaaaccttattttacagagcagttgttcgattgccgtattctgaacggtggacaggatatcctttggtggtctgagcgtaccggttggggacactattatctgtatgatagagaggggcatctgaaaaatgttgtgacgaagggaaattttgttgcctgccgtgcttcgcgagtagacgtaaagaaacgctgtatggtgtttgaaggctatggaaaggaagaagggataaatcctaattatcggttttactatagggtgaattttgatgggtccggaatgcgtttactgacccctggagacggatatcattccgtggaattcggatgtggagagccttatttcgtagatacctattcgcgggtggatatggcgcctgtctctgtggtaagaaatatggaggggaaactgctggtggagctggaaaaggtagatgttcgtaaaatggagagaataggttggaaagctccccggagaattcaggtgaaagctgcgaatggcgttacagatttatatggagtgatgtatactccatttgcgatggattcagcaaggagttatccgattattgcgtatgtatatccgggaccacaggaagatcaggtgcctcaggcttttgctttggatgataatagcaatcagtcgttggcgcagttgggatttgtggtggtacatgtcggcttccggggaggcaatatgttccgtggacggaatttttataatttcggttatggaaatttgcgggattatgctttggaagactgtaagtatatgatagagcaattggcagaccgataccgttttatcgatttggaccgggtaggtatttacggacattccgggggaggctttatggctgcaacctctttgttgacatatcctgatttttataaggtagctgtagctgcttccggaaattatgacaataatatctatacgaaatggtggggtgaaatgtatcatggggtgaaaattaagaagggaaatgagcaaggagataaaaaaagttatatttttgaatctgaaataccgacaacaattgagttggcaagccgtttgaaaggtaagctgttgttgataacgggcgatatggacaataatgtgcatcctgctaatacgatgcgtttggctcatgctttgattgaggcagacaaacgttttgatatgctggtcgtgccgggagcagatcatgggatagagtcgccctattattataatgtagtgcgccattattttgcggagcatttaatgggcgaaagcatggatggcgctgattttaaatgattttttgtgccgaagcatagtaaacagataacgtgtaataatggagaagtatttgtttttgaagattttttcaaagaatacttctctaagttttatgattttgctatgcgttttattgaggacaggcatgcttgcgaagatattgttcaggatacttttatttctatatgggaagggaatgtcgggtcgtatgattcaatactgatgtttcaggcatacgtttataagacgatacgtaataaagcattgaattatttgaaacacagccgtatcagggagcaatattcacagacatatctaaaagaactggaatcggaaacgtttataatggagtcggtattggaggaagaaactcattttgtgttatatgaggcgatacggcaattgactccccagtgccagcaagtgataaagttgcatctggaaggtaaatcgaataaggaaatagcagaagaaatgcaaattagcattgttactgtgaaaagtcataaaatggttgcatacaataaattaagagatatgttgaaggatgttgcaaccctgattttatttttgttgtaaaaaatatctgttttaactcatacttttttttgcttgagttgttttcactatagaagataaaacgcttagatgaaaacgattcaggaatatattaaaattgcgcatcttttggcgaaaaagttgttgggctctttaacggaggaagaggaccaacaactgctgaagtggtgtgccgacaataaaagagaaaagatatacaaatcaatattgtctttaaattctgcacaattatttaatcgttatcaagaagttgattctgagcagcagtgggaaaattttcaaaggcgcttgtcaagaagaaaaagtcggttttggcaacgttttttgggagttgcagccggggtctgtctgattgtcggagtgacgttttttttacagatgtatatgtcttcatctccgtctgagcaggttatatctatagaaaattatggagtgcagttaataacttcaaatggtagagcattgaatttaactgatcggagaaatctggatttgcgtcaggtggagggcgatgttgttttacgtaatggctctttggaatatcgtagcaattcaaaggaagaggcgcaagggagcggaaaaaatacgttggtggttcccaagggagctttttaccatttgattctttctgaaggtaccaaagtctggttgaattcagattcgaaaatcacttatccgatatcatttgtcggtgatgttagagaggttgaactggaaggagaagcttattttgaagtggtaagggatgataaaaagcctttttttgtaaagaccaagtgtttgcaggtaagggtgttggggacatgttttaatgtaaatgcttatggagataacggaaaagtttacaccgcattagcggagggaactgtggaagtttgcgatgtgaaagataaaagcgctttggttttaacgtccggtcaggtggcagaacttgatgtgcttcacgggcagtcaaaagtcaggctttcggagatatctttgtatgaacagttggcctggaaagagggtatgttttgttttcgcaagatgcctttggttgagattttaaagcagatagaaagatattatgacgttcaatttgtaggatgggagaaaatcggtgcagaagttttttcaggagatatctccagaaatgtgacattggaagaattgttggatgcgattgaaatacagacagtcggtttgcattttgaaattacaggtagagtagtatatgtagtagaaggaagagattagggtatattcggcctttccctaatctctttacgcaaaatgttcaagtgaacaaaaacatacaaatatagtgaaaaaaagaagtttaacgttttatttttgacaaaatggggaaaaagtttcgacgactagcaatgagcatgctcttgctgcttgttatagccggaccaggatatggttctgttatgttgcaacagcggatttctttaaaaatttccaatgttgcttttgttaaagtgttggaggaaatacggaaacagtcgggctacaattttatgtataatgaacgttatgtggaaaatatagataatgtttctgtcagtttcgttgattgtacgttggaggaggccatgcaagaggtgttgcagggaacaggtttgagctataaattgcagggcaatatcattattttacaggaagggaaagttgagcaggaaaaattccgcaaattgacgggagtcgtgaaggatgaaacaggcgctgttattcccggtgcaaccgttttgataaaggggacgtctaccggtttgtcaacagatatggagggaaaatttacgcttgaactacccaagggtatcagcgtattgcaggtgtcttttgtaggtatggaaactcaggatgtgaaaattcctgaacatacggataatataaccattattatgcgtgcgcatgtcagtgaattggaagaagttgttgtcagtaccggttatacacaaacgactaaaaaaagagcctccggttctgtggctgtcgtaaataaagaggtgtttgagaataaagccatccctaccatggacaagttgttgcagggacagattgccggagttaatgttacggcccgttcgggacggccgggtgaaagcgcaaagattcgtatccgtggaaccaatactttgaccggtgatgctgaacctttgtgggtggtggatggtgtgcctttgcagaaaaatattccggatatagccaccaaccagattaaagcgggagattttagcagtatttttacaaacggggtggctggaattaatcctaatgatattgagaatgtaactattttgaaggatgctgctgcagcagcaatttatggttcgcgggctgctgggggtgttattgtggttaccactaaaagcgggaaggcagggagactgtccgtgaattattctatgaatatgtctgtagttatgaagccaagcagagatgccggcctgatgaattcgcaagagaaattggcatgggagcaagagttgtgggatgagtttgctgctgctaagtatgctgccggcgagcgctatccggttgttggtattatcggaatgatccgctccggcaaggaggaatttgctcaaatgagcgatgtggaaaagaatgcctatatacagaaactgtctcaagtgaatactgactggatggatttgttatttcggacagctttttcacacaatcactatctgtctttttccggtggtcaggaaaaagttacctattacgtgtctatgggatattcgaaggataacggagctgtgaaaaaaacagattatgagcgttatagcttgtccgggaaaatcaatgcccgcccaagcgaacgtttgagttttcagttgggttttgatttgtcaagacaagaatcaacaggaccagccagttccgtagatccttttcaatatgcttattttgccaacccttatgagcaggcttttaacgaagacggttcatataaagccgattatacttattttaagttggcaaaaaacaacgggcaatttgatccgacagtaccgcctaacgggtttaatatattgagggagatggatgaaacaaaaagcgagacggataatatttcaatctcatcgcgttttcaattggattatactttttttaagcagttgaaattttccggattggcatcttattcttttacaaacaataagggagacagttatttaggaaaagaaacttatgccgcttacatggatcgtctgtattttgatactcaaggtacaagtacacgtacttatggctctatttcacaaagcaatgcgaataattcgagctatttgttgcgcggtcagttaagctattctgatgtttacaatgatatacatcgtctgtctgttattggtggtgctgaaatccgcggagaaaaagcagaaagtatttttgagaaacggtatggatatgatccggtgaccggcaattcggcgatgcctgtccctcaatctccaacgggtacggataaaatagattacagcgatattgttgcatatgcagacatggtcaatcaattgtcgggacaatcgatagttgaaaaccgctttgcatcgttttatggagctttagattattcagtatttgataaatatgtgttgaatttatcttttcgtactgatggctccaacaatttcggtagcgaggaacagtttaatccgacctggtctgtgggtgctgcctggcatgtcagcgaggagagttttatggatggtttgcgccaaatattgaaccgtctgtctttaagagttgcaactgggtttaccggaaatatcagcaaatccgtaaagccgaacctgatgatggattatagtaaatattttcgagttgtaggagatgaaagttttagaatgggtagtatacggaatgcgccgaatcctaatttgcggtgggagaaaacaagagatgtgaaaatcgctctggattttggtttgtggaatgaacgggtaagtggtctggtggaagcttattggcggaagagcgtggattgtgtgacttctgtaacagtccccgtgacaaccggtttcttctcacagtcgtttaatacttcagaaatagagaataacggtatagaggggtcgttgagggttgctgttttacgtggtaaagactataatttgagtgtttccggtaatgtagcctggaatcaaaacaagttgacgaaatatgaatcgcctaatggagctttgacattgggaacgtatgtagattatccgatggagtcgattatggccggtaaatatgaaggtatcgatccggagacggggctctatactttcgctttacgtccggatgccgttataaatcaggattctgataaggctaaggcagataactattactattatctgggaacaagtattgctccgattacgggaggtgtgaatttgacagcatcgtataagaattttacgttaagtgtaggaggatcctatgctattaacagtaagattgttgataatatagagtctcctgcggattatacgctcgccggaagtgctggtagccggaatgagagtattccgacatcccgtaatgatttgtatgtaaatcatctgaatgtgcgtagagatgtgacagatcgatggactccagagagaacaaccggagtgaaatatccacgtttgattgatgcttatggagagacgttggggtattatttcgaccatccgacaacttcgggcataacaagaggtgcattattggaaaatgtctcgtatctgaagataaacaatattatgtttggatatagtttgccatcaaaagctttgaagaagatgcacatttcatctatgggcttcagtttggcattgaataatttctttacagtaacaaagtattcaggaatagatcccgaagttcccggagcgacctatccggtatctcgttctgtaacttttggtattaatgtcggattttaataatttatacaatatggaacattttaagattataataatgggattattggcaggaggtttgttttcctgtaatagttatcttgatttgaaaccttatggacaagtgattcctaagactcctgatgagtttgcttcattgctgaattcaactttatatgagattgattatggtagtgataataatattataggcaattctacaacgatattgaattacgaatgttttgcggataatttagatgctaatctgacaaaatatcctgcaggtaacagtttggcattatatgtgggcaattctttgaatggtatgcagaataagtataggcagctctatgagaaaattcgggattgtaatctaattattgaaaatatgaaagatgacaactcagagttgggaaaggatattactgctgcatcctatactttaagaggagtgtgttattacaatttgttgcgttggttttgtgaaccttatgatcggaaaaatgtggatgatcagctgggacttccgttgattgatcattttgacatggaagcaaaggtgaagcgttcaaatatgaaagagacagtaaagtttatagaaacgagtttgaaggacggattggcttataatatgcagaacgatgtgtatcgttttgatgcggatgtagctaaagcttatttggccaaattgtatttttggacgcagaattggaaggaagtaatcccattatgtgaggagttgttggataaatatcctttattgtcgggggcagattatgtgaatatggtgcaggatttatctacaacaaagactaatattttaatccgttcggctatttatcaaggcatcagtagcggcagtgaaactgaaattacgacttcagttgctgctcgccctgtaagtaagaaatttatagatttatttactgaaaaagaggctgatatcagatatacactttcatttaatgcaaagcgtgaagagatgaagcgtttgagaggtcgggtgaggattgctgaaatggtattaatgatggctgaagcttatgcccatcaggatgatacaaaaaatgctctgaaatatttgaatctgttgagatcgcatcgtatttcgccctatgttccttatactgaggctagtctgccggatgttgatgctgaatcgttgttgaaaacagatgcaacaggtaaaccgttgactaagttgatgtggacaatcctttcggagcgacagaaagaactttttatggaaggtgatcgttggtttgaattgaagcggaacgggcgaccggaattttgggtgtcggcaaatggtttgaaatatactacactaaaattcatgtatacagctcctattatgcaggcagatgttgaattggtgcccggtatgcagcagaatccaggttatgaactttaaaaattgaagattatgaagacaaaatatataataggaataataggaatgatgcttcttttttgtagttgtgaaaaagaaaatgaggtgccaccctatcagaagactcttaactccagttatgtgatgccgaagccggtagcattgacggcagaggaaagaacatggctgaatgatttgagggaggaatataacaatgcaattaaagaccaataacatattaattattaaaaatcaggatttatgaaaaaggtaatgtatttagtagcattcttgatgagtgcggtttgggtgttctcttcttgtagtgatgatgatgatgattctacaacaaaacccggagatgaatcgtctactacggcagaacagattatctattcttttgtaaaggaaacggatgcgttgagtggtgaggttgttgtgggtattgagttgaagaatatggacggtacgaattatatagcaaaagaggcgattcatttggcatttgtatttgcagaaacttcgacagcagtattgaatacacactttactgttgaagataatgtaactgaatttgttgtgcccaaaggaaaacggaatgcaacgattaaattgaagtatgttgcattggaagagggtaaagaccttattgagatgaaaatcaatgctgctgagaattttgtggcaggtaattatgataagattaaaatcaagatttatggtccgacaactgtaggtaagttgtttggtaagtgggtgttcaaagaaacaacgagctttgatgatattaaaacaaattatgaaggagcaacagaaccgagtgattttgtgaatatgccggtaaataattcgaatttggatacattggagtttgtttctggagataaggatatgttgaaattgcatgtagccggagatatgaagaattatttcagggattgtgatgttgtttaccttgaagatagaactgtaaaagatccatataatggcgaacgaaaaacatattcttatattgaattcagtaaagtaaatgagaaattttcagcaactactatagaggagagaaaagcagaagtggctgtgcgtattttggaggatggaactttggaagtgatggtgtttgattatgctccggttgacttcttccaaggtatattatccgtaatggaaactatggaatatactccgattatttatactttcaccaaagtagaggaatgatgaaattgtggatatatttagtaagtattgcatgccttatggcatgcaatacgagtataaagaaagaggtatcgctttgcggacagataaaaaatccgttgggtaaaaatgtagtgcttgatgtatgtgggcaggattctgtgtttgaggcttctttggatgctggaggacgttttgtatttaaagtggagattcctgacggtaaatatgtgcgtttgttaaatggcaaggcagcatttcctctttatttggctcccggaatggagatagaattggagatggatgctcagaaagtgaaagaaggtaattatacatcagtgatatttggcaagggaagtaacaaagagacacagatgatggctcattattatgagcatcagtggtttccgtcatctcaagagatgttttcgcaagagcctgttgattaccgtaaattgctggaagcagttgtaaaccataacgatagtattattgatgtctttttgaaaaaggatgcgggaaaatatgatcaaaaatttgttgaattgtttaagttgcaggtaaaagttcctttggcagtatcctgcttttattatcctacatatcatagtttgttggtgcaggggaatgctgcggaacagccggagtatatcgatgtctttgatacaatgttgcccaagaacaatcgtgagatatataacaacgtatatcgttataagacttatgaagtggcgtattggaatcatatagtggcagaatcattggcagacgttgcagaagaggatattgtgaatgtctattttgacaaattgaaagaattgaatgtattgccggaaataagaagagatgccgccaggatttttttcacgcaggaagtgacaggtttgtcacagatagaaaaggatttgattaaaaagcggatagaagaattggaagagtgatttttagatgtatttttctttgcgggaatgcgttgtttctttctttcttttgattatctttgtcgctcctatcgggtataggagagtattaattttttaaattaaaaaaatggcaacaaaaatcagattagcgagacacggacgtaaaggtcgtccattctatcatgtagtgatagcagatagtagagcaccacgcgatggtaaatacattgaaaaagtgggaacttacaatcctaacacaaatccggctactatcgatctcaattttgacagagctttatattggttgatgaacggtgcacagccgactgatactgcatcaagaattctgtcttacaaaggcgttcttttgaaaaaacacttgttggaaggtgtgaagaagggtgcttttgatgaagctgctgctgaagctaaattcgaggcttggatgaaggaaaaagaagctaaagttcaggctaagattcagaaactggctcaggccggtgacgctgctgctaaggctcgtttggaagctgaggctaaagtgcgtgctgcaaaagaagaagtgattgcaaagaaaaaagctgaattggctgctgctgaggctgctaaaaaagcagaagaagctgctgctgctgaagaagctgctcctgctgctgaggctgaagctcctgctgcagaataattttattgcaatgattacacgggaagattgcataaaaatcggggaggttagtaaaactcacaacctgcaaggtgctgtgattataacaactgattgcgatctgctcgaacaatatgcagatgaaccggtgtttctccttttggagggagcaccggttcccttttttattgcggaggacggtttaaccgtccgtaatcatacttcttatatcgtaaagtttgattatgtgaattctctagctaaggcagagaggcttgtgggatgtgaagtgttgatagaaaaggagcttctggaagatgaggatatggagaacgtggggtatgatgtttatgatttgattgaattggaagtgaaagatgaggtgagtggcgctgcgggacgagtggtggatgttgcggattattccggtaatgtcgttttgacaatttctattttaggcaaggagattctcttgccgctttctgaaatgtatgtacatggggtggattttgaacaaggacttgtggatgtgcatataccaagtgagttagccgaattgaattgagagaaaagaaaagtgttaaaaaacttggttatttaaatcttagtttttattaagtgtccattttggaaaacttttgtctgttagtaactttttatgttattattaatcagtatgttgtgttgttgaaatggacaacttttgtaaaaatgatgttttgaaagttgacaatatagaatgttttttacttatctttgtaagaggaaaaaatcaaacatcaaataatataacacactatgaatgaacagttaaacaaagagcggcagacttatacgcaagaagaggcctttcagagttcattgaattatttcaagggagatgaattggcagctcgtgtgtgggtgacaaaatatgcattaaaagattcttatggtaatctttttgagaaaaaccctgatgatatgcatcgtcgtttggctaaagagattgcacgtatcgagtctacttatgttaatcccatgagtgaggatgcgatatttgaagtattgcgcgattttaaatatattgttccccaaggaggaccgatgacaggtatcgggaatgatttccagatagcctctctttccaattgttttgtaataggtaatgaaggaccttctgattcatatggtggagtgatgaagattgatcaggagcaggtgcagttaatgaagcgtcgtggtggggttggtcatgacttgtctcatattcgtcccaagggttcgcccgttaaaaactcagcattgacatctaccggtattgtgccttttatggagcgttattcgaattcaactcgtgaagtggctcaagatggacgtcgaggagctttgatgttgagtgtgtcaataaatcatcctgattcagagagttttattgatgcaaaaatgacagagggcaaagttaccggtgccaatgtttctgtcaagattgatgatgaattcatgagagctgttgttgatggtgaaaaatatgtgcaaaagtatccgatttattcggaagaacctcagtataaaaaagagatagatgccagacagttgtggaataagattgttcacaatgcctggaaatcagcagaacccggtattctgttttgggatacgattattcgggagagtgttccggattgttatgcagataagggatatcgtactgtgtcgaccaatccgtgtggtgaaattcctctttgtccttatgattcctgtcgtttgctggccattaatttgtattcatatgttgagaatccgtttacgaagggtacattcttcaatttccctttgtttaaaaaacatgtggctattgcgcagcggattatggatgatattattgatttggagttggagaaaatagatgctattttggcaaaaatccactcagatccggaaagtgatgaggtgaaaggtgttgaaatccgcttgtgggaaaagataaagcagaaggctcgtgaaggacgccgtacgggagtaggtataactgcagaaggtgatatgttggctgctttaggattgcgttatggtagtgacgaagctatcgattttgcagtggagattcagaagaccttggcggtggaggcttaccgtgcatcggtgcatttggcaaaagaacgtggcagtttctcgatttttgatgcagctcgggaagtgaacaatccttttatacagcgattgaaggaagcagatcctgacatgtatgcgggaatggtgaaatatggtcgtcgcaatatcgcttgtctgacaattgctccgacagggactaccagcctgatgacacagacaacttccggtattgagccggttttcctgcctgtgtataagagaagaagaaaagtgaatcctaacgatcaaaatgtacgtgttgattttgttgatgaatctggcgatagttatgaagagtttgtcgtatttcaccataagtttgccgaatggatgatggttaatggctacaatatgacgaaacgttatacagatgaggagattgatcaattggtggcagaatctccttattacaaggcaacttctaatgatatagactgggtggcaaaagtgcgtatgcagggtcaggttcagaaatgggtagaccattccattagtgtgacggtaaatctgccttcggatgttacagaagagttggtcggtgagttgtatgtagaggcttggagaagtggctgtaagggatgtacagtatatcgagatggctctcgtgcaggagttttggtttctaataaagataaaaaggagtctgtaacgaaagaactgcctgccaaacgtccgatagagttggatgcagatgttgtacgcttccagaataataaggagaagtggattgctttcattggtttgtataatggacgtccttatgagatttttaccggtatcgcagatgatgaggaaggtatcatgttgcctaaagcggttacttctggaaagattgtaaaacattatgatgcagaaggaaattctcgttatgacttccagttccaaaataaacgaggattcaagacaactgtagaaggtctgtcttataagtttgataaagagtattggaactatgcaaagttgatttctggagtcttgcgtcatggaatgccggtacatcaggctgtagagttggtagcttcaatggagtttgataatgaaaatatcaatacctggaagaatggtgttgaaagagccttgaagaaatatatcccgaatggtactgaagctgccggtgaaaaatgtgagcagtgtggttctccggtagtttatcaggaaggatgtttgatttgtacaaactgcggagcttcaaaatgcggatagtaatagaataaggagcagaatatcaaatgcagttacattacggaatagagaatttacatatagataatccggtcgtgacaattggaagtttcgatggggtacataaggggcatgttcaggtgattgcttctttgaaaagagttgctgagcgtttacaaggcgaaacggtaattatcagttttgagcctcatccgagagaggtgctttatcctttggaaaagcggcctggtatattgactacgttggatgaaaaagtggttattttagagtcgttgggtgtggcacatttgataatattgccatttactcatgcattggcagagttgacgtattcggattttgtgcgtaatttgttagtggataagttgggtgtgaaggggttggtaatagggtatgaccatcgttttggaaaaaacagggaaggcacttttgataaattgaaggttttggcagagcaatatcacttttatctggagcaggaggatgtgtatgaagaacataatatcaatattagttcaactaagattcgtaatgctttgcaaataggagacattaaccgtgtcaatgaatttttgggatatgcatattcgatatccggaatggtagtacaaggagaccatattggacgtcaaatgggatttccgactgctaatattaaattgaaagatgaacggaaattattgcctgcggtaggagtgtatgctgtggaggtttttgttgtcgggaaattgtatcgaggtatgttgaacataggagtccggcctacggtaagttgtagtggagaggttaggatagaagtacatatctttgattttactggggatttatatggtagcaatgttcgggttgctcttgtttcccgtattcgcggagaacgaaaatttgacggaaaggaagaactcgccgaacaattgcaacgtgataagcaatcagcattgatggtatttagaaacggtattgtaccattaaattgatacggttggcattaccgtatgtgtgattgaaattattgcgatgtccaaatacatattcgatgccagttgttccaaattcagtaaaatcccacaataaattggcagcggtatattgcgtatatttataggtatcaccgcttaggtctgcttgttctcctaggcgtgtgtagctatatgtgacagttgaatggagtactttatcccaaaagtgttggtaagcgaaaaaaaatccccacatggaaggagctttcagtttaccattttggttcggattagggattaggtcgaatccttggcctgcaatatcttggatgtagtgtgcaatacctttgccatattctccttgtagcatgaagcaatttttagtatttaaattgatcttgctactggccataactccccagccgttgcgtatgtgatcttttttatgcaacaagtcgtggtaactgatgtttcttagaattcctcctagttgtatatggcttttgtttaaaaaaatatactgaatggttaggggtatatccggcactttttgttgtatttcttcgatgtatttgttcgtggtataggatgtggcagcatattccaaggcgagagccgtttgccagtgattgccccatttatgagtgtagcgcagcatgggttggcgtacttcaagagcactgcccggtccttcgccgtcaatggttgtcggtacggttgccatgtcgcagaaggtactccaggtttgtcctaatgtgaagcctcggaattgtatgaaggcttgacagaggcgtgccgtgttgtgtgcaccttgaaagtccatttccagataggtcacgattcgtcctatttcagtgtcgcccaatagtttgaaaaacaggcgggattggttgacagccataccgtagctacagcctttttgatgtccctttggtgcaattttactggtaataaagctattgtgattgtttaatccattaaaatcgtaggctccggttaattggacatatccaccgactccaaagagaaaatgttggtcttcatcaaaaaaaatgaagcgaggtgctgcgggatcattatgttttaatgggaatgcatctcgcataatgatgtagaaactgttggtatcccgattttgggaaacagatacgacgctgactttttgcgcttgggttgtgagattgatacatatcaatccgaacaatagaattgaaaatattttactcatactttttatatgttagtttggatgtgtgtacgagtaaaatataaaaaggtgacattactataaaaaaagccctatcctgatgatgcaagatagggcagagaggtatatgatgtttttacatcaattgctgtaagagtgtgcgtaaatcacatttttctcttaaaattccagacagactgtctattgaaacgcgctcttgttccatggtatcgcggtcacggatggtaacagcattatcttctaatgtctgatggtcgattgtgatgcaatagggggttccgatagcatcctgacggcggtagcgtttgccgatagagtctttttcgtcgtattggcagttgaaatcgaatttgagcatattcatgatttcctgagctttttctggcagaccatctttttttactaatggcataatggccattttgacaggagctaatgctgcaggtaatcgtaatacaacgcgagaatcttttttgccgtctttgcttaagtcctcttcacaataggctgctgacatgatttgcaagaacatacggtctacaccaatagatgtttcaataacgtatggcacataggattcatttaattctgtatcaaaatactgaatttttttaccagagaacttttggtgttgcgataagtcgaaatctgtacgggaatggataccttccacttctttgaacccgaatgggaatcgatattctatatcagttgcggcatttgcataatgagctaatttttcatggtcgtgaaaacgatagttttcttcgccgaagcctagtaactgatgccatttcatacgagttgttttccattttttgaaccaatcaagttcagaaccggggcgtacaaagaattgcatttccatttgttcgaattcgcgcatacggaaaataaattgacgtgcaacaatttcattacggaaagctttaccgatttgtgcaataccgaaaggaattttcattcgtccggttttctgtacgtttaagaaatttacaaaaataccttgtgcagtttctggacgcaggtatactttgtttgctccttctgcagtagagcccatttctgttgcaaacatcaagttgaattgacgtacttctgtccaattgcaagtacctgaaataggacatacaattttttcatccaagataatctgacgtacttcgttcaagtcgttggcatttagagctacactcatgcgttcgtgtagagcatctcttttacggatgtgttctaatatttgcggattggtttgacggaataatgcttcatcaaatttttctccaaatcgtttacgtgctttttcaacgtctttctcgattttttcatcatacttggcaatttggtcttcaatgagaacatctgcccggtatctttttttggagtctttgttgtcaattaatgggtcattgaaagcatctacgtgacctgaagctttccaaattgtcgggtgcatgaaaatggcagaatcaatgcctactatgttttcgtgtaagcggaccattgagtcccaccaatagcgtttgatattgttttttaattcaactccattctgcccatagtcgtatacagcacccagtccatcataaatatctgatgacggaaatacaaagccatactctttacagtgagctactaatttcttgaatacatcttcctgtgccatgatatagtttgttttttttgtttgcaaaaatagtatatattaatgacaatgaagaataagcttgaaagcttattcttcgtgtcctatttctttgattgcttgtgttacattaatagcataatcaccgattttttcacactctgagaacatgtcgttgtataggattccggtaggataatcataccgcttttcttcaatggcaattaaatgttcttgttttaagatggtgcgataatcgttgatagcttgttctaattcgtatgctttttttgctgttacttctttgtattcttgattaaggttattgcacattgtagtcaaggtgtcttctactaacgcaaacatgtgttttagtttgttggttagttcttccgggaaaatgacattctggtcgtttcggcgattaattgctttggccaggttgagagacgagtctgcaatactttcaatttcagaaacaactttaaacatagcacgaatacgttgagagttttctgttgtcatcttagattcggaaactttagtcagatagtttgcaatttcaacttcgacattgtcactttcatcttccatctttactagattttcaaatttcttttcgaaatctttactgggaagttcaagacattctgttacttgatgaaacatatccttggtgtttttcccatagagaatgatttcttgttttgcttgaaagagcgatgtgtctggggttgatagaagtccgattttgatatgttttaatttgaaagcatcatttcctgtttcttgagccggaataattttggtcgcaaaacgtgcaattagttttgtaaaccatattagtattaagacattggaaatattgaatgccgtgtgaaagagagatagagccatcggtacagcttctacacttgtttctggatttccgatgcccatagcaacgcttaatgcttcaatccaacctaaaaataaggggaagatggataatacccatattactccaaaaacgttaaacaggaaatgggcgaatgctgctcttttggctgttgaatttgcaaccattgcggcaagattggctgttactgtagttccgatattttcacctagaaccatagaagctgcaatttcaaagtttatccagccgttggcgcacatgacaagtgtcagcgccatggttgccgaggatgattgtatgagaattgttaggactgtacctattaacataaataatatataagaggcataacccatatctgcatattcctggaggaaagtaaacatttcaggattttcatccagatttggcatagagttttttaaaaattccaatccgatgaataatagaccgaatcctataatcaattctccccaattctttctggagcgtttattagagaatagtaaaggaaggcataaacctatcatgggcaaggatatttcggccatgctgactttaaatccaagaattgagattaaccaagcagtgacagtcgttccgacgtttgctcccatgattaccccaatggattcaacaagacttaagagtccagcattcacaaagctgacaaccataacagttgttgctgagctactttggattattgctgtgataaggataccggtgataacgccttttacccggttggaagtcatggctgatagtatatgacgcatacgctcgcctgctactttttggagagcttcactcattagtttcataccatagaggaaaactcctaaagagccaatcagtttaagaaaatcaaatagtccgtactccatgtgttggttttattgttttgaatttataatttggtttacttaattattgtgtcctatttctttcattgcttctgtgacattaattgtatagtctccaattttttcacattctgcaaatatgtcagtatacagaatacctattgaatagtcatagtttttttcttcaatggcaatcaaatgttcttgttgtaaaagcgtacggtaattgttgatagcttgctctatttcgtaggcttttttgggattgacatctttatattctagagttaaattgtggcacatcatttcgatggaattttcaaccaatgaaaacatgtgaaacagttttgtatgtaaagtttcagggaataccacaccttggttattgcgtcgcataattgcttttgctacattcagtatagaatctgctacactctcgatttctgatacaattttgaacatagcgcggacgcgttgagaattctctgtcgttaaacgagattcggaaactttagtcagatagtctgcgatatctacctctacttggtcgctctcatcttccatgagttgcaatttatcgaattctttttcataatcactttttgacatttcaaatgcttgaagcatgcgtttgaacatggaaaaagtattttgtgcatagagtgtgatttcttgttttgcttggaatagtgatgcatctggggttgacaataagccaatttttatatgttttaaagtaaaagaatcatcacctggttttaggggtagaatacggctgacaattttagccaatattttagtgaaccaaataagtatcaatacatttattccttttgctaacgtattgaacaatgataaaactaagggcattgctgcgtggatagaggttagtacactggctctttcttcaggattgaatgttgaatttaaaagttcagggtcagaataaatagggttgtaatgagagagatgcaaagtaacagaaagatctccaataaaatgtaggaatggattaaaaatgaaaaacagccaaattactccgaatacattaatggtaaagtgggctaaagcagcacgtttagcttgaacattggcaactgctgctgctaaattagctgtaattgttgttccgatattttcgcccataatcattgccgctgcgtcttcgtaaccaatccagcctttggcgcaaatgacgagagttagagccacggttgctgatgacgactggaaaattgtggtcaaaacagcaccaattaataagaatatcatccatgaacggaatcctaggttgctgatgttttggatgaagtcaccgactccgggataatcttgaagattggttggcatagcttcttgtagaaatcgtaatgcaagaaatagcaatccaaatcctacaaacatttctccccagtttttacgagagcgtttttgtgaaaataatagggggagtgtgcagccgataataggaagagctaggtcgctcatgctgaattttcccaatccaagaacagcaacgagccagcttgtaattgtggtcccaacattagctcctaatattactccaatggaacctacaagatccaatagtccagcgttaacaaaactaacaaccattactgttgttgctgaagaactttgaatgagagcagttataaatactcctgttaatacacctgtaaagcggtttgcggtcattgcggttaatatctgtcgcattttattaccggcaagcttctgtagagattcactcataagtttcattccataaaggaataaagccaatgagccgatgagctttagtaactcaaagaggccataatccatctcagttgattttagtttatatttcagagtgtaaaattaggaaactccaagcagttacgaaagtattacattaataaattttagaaaacaatgaaagggtatcaacaatacaaatgtcggtaccctttcatcttctgataattggcaggttttattgaactacttcataggtgaagattcgtgcttcattttctgttgataatgataaatttgttaaatatccatcattatctgttgagccttcaatatgtataccttcttcactgccagttagataatatttttctggaatattcttggaatttctacctgtcaatcccagaaaaccagcatacttaataaaagtatcatctgttaatagtaatggcacattgactccgtaagcatattgagtgccgtattcaaatggtatattgcttccataagtcatgatgtcttttaagttgtagtcgctatatgtggcttcccaaatgggctcttgggtaccagcctctgttatttgtgttaaataaccttcgttgtaagtccattcataaacatatgattcgtcccaaacatctaagactgtacaggtttccacctgattgtttttcacttcaaaagtgatggatgaatattcgattgaattatgaatcacgactttaatttgattaactgtgttgtattcaaatgtggttgttgttgctttttcgccgacaatctctccttcttcttcagtatattcaataattttagtcagtcgtccttgtgtatcatatattaattcggaaatattttgtttaggtgcaatccaaatactgtctgtaggtccccaaggctcttcttctgaccaggctgtgtattcccaatatccggcaacaggtatcattatactgtttagtcgttttatgagaagtgccactgctttgatttcagatttccattctccgccatcttgtgtgagtacgatggtataaaaggcttggctttttaaattggaaggtacatgacaagtcagaccattttctgtactgattatttctagagcttcagaccgtttcccatcaatatcttctaaataaaccttggctgtagagttaaagccttcgccttggatagtcatattttgtcccatgtgtaattctgtcggatagacaaggttttttatgggattactcatagcaagcagagtgatttctcctaggggccatgtcccgttttgttttaaaatgatggtgtatttacctggagttagctctgttggaactttaaattgaatgccagtagccgtaaattctagatcctttacatggatttcttcttcattctcatttctaaaataaatttgagttgatgttttgtcaaatcccgaaccgttgattgtgaaaatatctccaattgacgccatgctattcatgacaacatcggttaaaggagtttgtggactatcattttcatcggagcaagctgtaaatcctaaaatagaacttaccataaatagtattaaccataatttattcataatataaaatttaataggtttataattagtagttttaatgttgattccttgatttgattactaagtctatacaggttgcgcttttaaagaatttttgagcgaatgttttaacgtctttccctttaattttatttataacattgtcaaaaaattctggtgcatccatggttttgccggtcttgttataaaattgtaagttatcagtccaaaatccgatggtattatagcttgtttctcgtatagctttttcttcttttttaatggctagaatgtagtcctctgtctcttcatccgaaataccattttgtatgaactgttgaatttgttcatgtacaagagctctcatttgaggacctttggctagttctgtagcaaatcggatgaatatttcctgtttgtatggatggatattggctccaccttgtacttgtacggcataagcagcgccttcatttccacgaattctttccattagtttgtgttgtaaatacatacgtatgattcgcatgcaaatagcttcacttggtttggtttttagatgattttcgtattcaatgctaaccatatacttggcatctggaataccaacttctacgtcttgggtaatattaccttgtcggtcatattggtgttcaatagctgtttctgtattatatgttgatggtaaggacgcaatatatcgtgtgattagcctacgggcattttctttactgatatctccgactaaatagaagataaaatcagatgcattctgaaagcgttcttggaatatttctgtcattctattataattcatagctttataatagtttgaatcttttttccacagacggggactgtcgactcgtcttattcctgaaattgtttcacggatggagtcattgacggttggacgggcattgctttgagtcatttcattgatggcaacaaagcgctcgaacagaaccgtgtcaaaacgaggcttttgtaaagttaaatatagatattggaaagcattgtcagcattctcggatggtgcagaaataccaatgctttcagaacgctcttccaaggcgagatgcatattaatattttgttgttgtgcccaaaaactgatacttttaccatcgtatttatagacaccgctttgttgtgctaatgctgttaaagcatctgcagatggaaggtcttctgcttttaataaagagcgacctcctttgctgcctgctaaaaggttgaataatcctttgttaccatctgtatatttataatatactttggctccattggagagggtccattcttctgcatccaacgtttttatctgtttacttttcacaatttgcccttcagggagattgaaatcaatcaagttctctagttcattgattgttgcagtttgaataagctggggattatttgcagttttgtgagattcttgtatcatactaatgatctcatttgatactgggaatggataatttgcatcattcccttgcataagaaatgcccagttattgttattgttataccattgtgcaatccatgtttggaaggttgaagcagataaagtgtcaagaacttgaagtgtcgtttctagtttttctttgacagaacatagcggataatgtaataagaagttgtccttgaatatctgtaaatatacattattcgggatatgttctgtttgttgcagattttctctgacgttattctgatagtttacaaacatcggtttaagaatttcgtcagtgaaaccatattgatgtattgaggcaatttgattaagaagttgttgtaatgcttctttctctttgccaggtaaagaaacaagagcaatattcaagttgtcatagttacgtacaaggtcttttaaaacaaccccggcagtgagaatgtatgattcgccggcttcaacatattcagctaaaaatcctctcatgatttcattatagaagtctcgtaagagtatctctcgtatcatctcttctgttgttggtttttctatttcacggaagcgtttgaccaacatgactgattgatttggaatatccttgtcaatgagcttagcatacaaaggactcatattgtcttctatattataaaccaggcggggtttgggattttttcttttgggtataggaatgaacagctctctgacttttttctccgttttttcaacattaatgtctcctatgatgatgacagcttgctgatcaggacgataaaaatcttggtagtagctttttaattgttctggggtaaagtctctaacaacctcaacactaccgataatattgtgtgtcgcatatttactgtggttgtatagatatggttctgctaatccctgcattcttttggaaagagtcatgcgtaatctgcgttcttctcgaatcactttgcgctcttgatccatatcttctggtttaagtgtcagaaaacctgaccaatctcttaatgctaagatacatgaatcaacgacctcttgtgttgcgacaggaatattgttgatattgtatatcgtttcgtcataccccgtatttgcattaaaggtattgattccatgtctttgcaaaaaagccggaataccttcaggaaaactggttgttgcatgaaatgccatgtgctctaatacatgcgctaacccattttgatctgcattttccattaaagctccaacgttttgaactaaataaaagtctgcagcccctggattttgcgttgtctgttggatatagtatgtcagtccattaggtaatttaccatgcttgaattgagtgcttttgttttgggcatgactcatggagcaaaaacaactcagaagtataataataatggttagttttttcatagtgagtttaatctactttgaatcatttgttgtaatctcagcatcatggccttgtcttctatgcttgcactagtgacgaaagcctgattaaagcattgttttgcttttacagcattatcagtttctttataacaatctcctaaaatgcagagtacacgagtccttacttgcggggacatttgtggaaatgttaaagccttttctagccacggaattactttcggataagcggattcgggaattttcccttgataaagagagaaaagatcttctactggcattgtatagttgttggctgttgttacaccttcagctccttcaaagtacttgttcatcttttcgaagaatatatctgtatttttacggaataaattgtagtagccgtctgcaagtagggaaatagcttcaaatgatgttagtttgccgaacggaatattgctatatatgatttttaaatctccgtttacacgttctaattcttgtttatattcagctttcccttcgcggcataacgaaatgatgtagctgttgaataagccgaccaaatatttattgacttgtgctttgcccattttctctgcatatagagaataattggcgactaaggcatcaaatatgggatcgtttttcgtctttttaccatggaacatggtcaaaaggatgaagtcatcaggatttgccatgttggcgattgttttagtctgtaaatattcatcgaagatggcttctatacgagtagaccatttttcccgttcatatccttgttgtgtattgataaatgaaggagcttgtgccagaaattcttgtctgagctcaagatttttcttgtctttttttagttttgtatatagttgttcaaagctaagtgcatctcctgcagcaaccattgcttcatgtacaaaatttgcaggggcggttgctccgttaagtgtacgtaaaatttcgcctttgttgttaatgaataacatggttggcaacgcatttacttggtacttttgtacaatctctttattttctggagtttctacatttatcttgaggcagatgaaacgttcattgaagtaatcgcctacttctggtaaagcaaatacttctttttccatgattttgcatggttcgcaccaatctgcatagaaatcaagaaacagattttttttctctttttttgcattagccaaggcatcttggaattgcttgtcagaaaatgtaatctgtgctgtcgtcggtgaatatataccaatcagcaatattataagatagaaatatacgaatttcatagcaaggtttattattctaatatgaacgtaaagatatcttcaagtatggcagaatgtccttcattttctacctttaatgatatgacatataagccttcaggtgcatcgattttggcgtctacatacattcggcctcctccaagaatggttaggtgttctgcaaaattattggcagcttctgttccattgggtgttttgatttctgcaagcgaataaataagaggttgtgtccctaaaatttgttctaactgagctgttgtccaaggaacagctttttctatctgagtcttgagttgggagatttcatctctaattgtgtatgggtctggaagattttgattatagcattgattcgttatagtactttgattgtttcggatagctttttcaacctcccatacaaccgtgtctttgtaatggatgtattttttttcatactcatccattaatttctgataataaggtttctctgcatcagaagcgtttttatactgttgccttattttttcgaattcttcatacatttctatgcgtattttttctttttcagcatagtcgatttccagagaatcagtttcttccaataaagtgataatgtttgcagggtaagtgtcaaacatattctctaaatcagtaattttcttttgtagattagagaaacgtatgattcttaaagagtcaatggaaaaagctgcagtatctgtatataggtatcctatatcaggtttattacagccaaataggcagatgcttcctaataatatgatgatgtataatagtttattcataattcttttagttgttgatgttatcaaatatgaaatcgtaacctaaagcctgtactacaccattatttgtttgaatgtcagtggagtagatgcgtaaatcgttggcagctccgtccatatggaagtacaaagcaatttctccaacatctaaaattcccatataaggctcttggtgggtccacataaataattctccatccaatgtttgggttcttatgccaccgacttcagctccagtgctggcaattctttctcctcgcgggatattagccaccattaaacgttgtggaataattagtttagatagcatttttttgcaaaatgctggagacatgtcggttacacgtttcatcttattttgtagtaaataggtttgaatactaaggttggttacacccaagaatgtaatttgtccatattcacttttcccttcgaatatatctctcatgccggcatgttctatcatgaccatggtggagtcccagtcgtagggctgttttttgaaatagtcccacatggagcaatcatgggtaccatttgctaatcctccgtcttggtagttccatttggtacacgaggatgcaatccctagtagtgaaataaggaaaatgcttttcagtaagtatgttattttttccattgccaatatgtattttgtgtcattaatgtattttttgtgaatgcagatgcattgactggagtgtagagagctccgttgagaacatcctgttgggtcagttttttgaattctccctgtaggtattctctgtaatatccattgcggataacatcgaaatagaaatgaccttcgccgaatagttctctacgtctttcttcaaatatttcacggcgtaaatcatgtgcttgtgaattgtcgtagttcggtaattctgcgcgattacgtattttgttcaagtcgtctatggcatctgcgcgatttaaacgggcacggcattctgcacgtagtaatattaaatcagcaagtctccatactacccagtcacaatcagaaccgatgacaggtcttgtctgtacaatttctgtattttcctgaataacgacatctcgccatttggcaatatgtgcataacgggttgtcacatatttcccgctggttgatttatatttcaatttacctaattcgtgccaatattctcttctgcgtgcatctttttcttctcggaatattttctttactgttgcgacagatatcttattgaattcatcagaataatctattgcaagagctgcaatggcagacgagtctgtcgttgtatatgggaacgacaataacatttgtcctggttgttttgcatcgtatgaatccagataacggttatcatagtctaatggatcattgtctatacaaaaaattacttcattgctttttcttaccttgccgaatacattgggaacaagatcttcaatggattcaagttgataggcacctgctttgccgtcaatgacctcagatgcatatgattctgctaatgtccagtattcagcatttccggttagtcctcccatccaggcataaatattggcaagcaaagtttttactgtacctaaactagcatattgttttgatgtaatttgattgcctttagaatctgtcagttggtcgtatgtaggcaaattaagggctaactttgcttcttttgcagcttcttccagaacatctaatgccggactttttcctacgggatcaatggactccgaattttttacaatgggagcgtctccccaaatttgcgctattctgaaataagtcatggccttggcaaaatgagcttgtgctagccaaaagtttgtgcgctccttggaaatgttctcatagcgatattcattttctatcataacattggccaaatagatgacattataataattggcccaactgtcacataaggtctgggactcttccggtagataggtatccgggtctaaagttgcatagcctttgagatcataggtcaggtaatcggcatctatggagatgtagaaatagggttctttaccgatacatatatgtttcatgttgcatcctatgctgttgtagaatgcttcaacctcactttcatttttaaaatagttgccgaatgttatagacgtttctggctctacatccagccacttgttgcatgaaaatagaggaaggaataataaaagtgttaatatctttttcatagcttccatggttttaaaagtttacagatagtcccacagtaaatttgcggggtaatggataagttcccataaaatcgattccttgtgtcggatctactaattcaggatcaacccccgagtagttggttagcataaatagattttctcctgtaacaaacacacgggcactttgaagttttaatttcttcgtaattttttcatttaggttgtaaccaagagtgatttgtttcagtcgtataaaatttactttttctatgtcacagtcatagcgtccggtatattgatctttcagatacatatacatttgtgctttggggtaatctgggttagactccggacctgtccatacattagcttttttcagatcagcaaaaatagggaaggaactggcttttacctccatacttctatcatcataagctttgatgatatggcggccgatggaatagttgaaaaatatattcaaatcgaatcccttccattgcaaacggtttgtaaaaccgccatgtgctaatggtaacggactagctgcgaaataggtatcgctttctgaaatctttccatctccgttcaagtctataatacgacgggttcctgccatgaatattccgacggtgttaccagtgtaaagtggttgttggcttctgtctgccagataatacatgggaacttctccttgtgaattatagaatccttctgttttgtataccttcaattggtgtaacggcttgccgacaacttgttctccgaaatcaaaaccgtcagcgcttttttcgaaacggttccagttgcgggatacattgaatttcattctccattttaattctgtatttcggaaaatatcggcttctaactcgatttccaacccttgattggaaacagccataccgttttgccattgaaatgcatgatagaatacgtctccgggaagttctatcatattcaattgtcctttagtataacgataataataatcaataacagcgtgtaggcgataatctaagaagctgacatccagtcctaagtcgaattggtttgtttcttcccagcttaattttttatttattactcctccgtttacatccggtgtgatacctacattgccatgaaatgtcccttgcggcatcatcaaaccttgacttaagtatcgttgtgagaatttctgtccggaaactccccagctggccctgattttaccgaagcttaaccaatagaattttttcatgaaattttcttgtgaaaatgcccaaccggcagcaaccgaagggaatgtagcccatcttacatcttctccaaacactgatgaaccatcgcggcgaacggttgcttctagcatatatttttctttgaagttatatgttaatctaccgaagtaactattcatacgttcttctgtgaaatcagaattgtattcaaatgctgagacataatacggattttctcctgaactggccgtgttgttaagaccattatctcctccccaaccattagaaccaacataatgtactttatcatttggaccatttatacctttacccttgttggtaaatgattggtctttctgaaaggataaacccagcatgacattgaaattgtgcttgtccaaatgatgaaattcataggtcagcagattttcattcagtaacgttaccgtgcgtccaatcgtaccttctgattctgaaaaatgggtatatgcgtctaatgttgagggcttgaaagtattttgattttgttgattgaagtccactcctgcagatgcttttagatgtaggttgcggataatttcgtagtcgagaaccatgttatagcgcaaagaataactttggttcttttcagatacttcgtttagaatttctgtcatacgttctccgacaatgccgttccccggtagcaatgtagaggttttattggcatctgaactgacaccttctattttggatgccccgcttccggcattttgtccgcggcttcggtcgctgtaggttaatgccaattgtgtatccattttcaaccgtttggtggggaatgcagttaaattggacattacattaaaacgggtgaatcctgtgttgacagcgataccgtcttcgtcatagtaacctgctccgacaatgtatcttattttttcgtttcctccggcagcctgaatattggcattcagaacttttgctgttctataattttgacggtaccaatgtgttgagttattatagaaaggattcaaactgtcttgtaatacaatggagttttgtggacgagtagtccctccaaaccaaccatacataggaccttggtattttttattggcaaagacctcttcgtaagatgtcggtattttccattctccatctgcagtttgatagggggcaacactattgcgcaatgcatttaaatgataatagcgttcgtagcttcctcctgattgtaggggagcttctggtagccaagatgcagagtatgatacattggcagagaagcgagcctggccggcacgaccttttttggttgtaatcaaaatgactccattacctgcacgagaaccgtagatggctgccgaagctgcgtctttcaacacttcgatagactctatcatggaaggatctaagtctgataatgtattgcttcctgtgatattggatgtaaatgcctgcatcggtactccgtcaataacatataagggcgttccgtagcgtctgtcaacactttctccatcaacaggtaaagagctatatccacgaatgctgacaatagaaccgccaccgccaggtgagccggaaatattactaacctcaacacctgccatgtgcccttgcaacaggttttccagactatgtgtcggaagctctttgatatcttctgatttaacggatgagatagcgctgattacggtgcgtttcttttgagcaccataggcaactacttgaacttcctcaagatttgatacatcttcttgcattttgacatttatctctttaccgggtgtaaaagctatagtttgtgttttgtaaccgataaatgagaatatcaatttgccctgtgcttgtggaagggttatagaaaaacgtccttctacatcagtagcaacacctagttgggtgccgtccaagcggatggttacgccccccatggggatgttcttttcgtcaacaacttttcctttgatggtataagattgtttcttatcatcttgaacttcttgtttttcgcggaacaaaatgatagtcttgtctaaaatgcgaaaggaaaatccagtattggctagacaagttgttaaaatctcttctatactcgcattttgaacatccaatgtgatattggatatctttttgactgcatcgtcatcaaaaaagaaactgaattgcgactgagaccgaatgttgttcatgacattttccagcgatgcctttgtcacttttaaatttagttttgtttcttgagaatagactgaggcggatagctgtagccatcctgcgaaggtgaataggaaaagaagctttaaaattctgctcttttggcaccatcgctcgtctttcaagcgtttgctatggttcattttttccatgagttaaatgatttgtattattataaatgttattttatttgtaatcctattgaaaccgtttgagccttgactgtgaacttaactcgcttgttttgttccataatgctgagaatgtcttcaaagcgatctgtcttgtcgatatctccggtaaagcggatgtcttttacctctggatttaggtagaatacttgtaaatcataccagcgggctaatgtgttgaataagtcttccagacggatgtcccgaaagacgattcgaccgtctttccaagctgagtacagataggtgtctactttttgtttcgtgagtgtcccatctgctatattaagaaaaccttgttctcctgggctgaggatcactgttttctgataactcttgttttccatctttactgcacctgagacaagggtggtactgatgtttttctcttcaggataagctctgaagttgaagctcgtccctaatacggtaacttccgtattgtttgaaactacaacaaatgggtggctggaatctttttgcacctcaaagaaagcttctccttctatataaacgatgcgttttttggcattgaattttacaggatagcgcatggttgactctgcatttagccatactttggtgccgtcagccaatgatagcatatattcacctcctctaggggtgcgcagagtattatattgtgtcgttgttgtgtcattgccttgattggagtaagtgacttggctgccttgaatgttgatatgtgttcctgatggatcttgtagctgcgtaaaagtgctgtctgatagagaaatttgctctccttgagccaaagttaaaatggcttttttacgtatggggctgatttcttctgcaataaattcagacgccgccgggcgttcatatagccatagggctgtgccaattgaaagtagaaatacggcagccgctgcatattgtaatatacgtctgatggaaatatgtttttgtttttttcttgatagaaaaacttggcagtctttttgccaatcaatctcagttctctcttggctcttctgttttaaaaattcgatagtcttaaactgttcatactgctccttgtgtctgtcggattcggccagccatttttcaagttcctggcattcttgtgcagataattcttgctcgaatgaacgggtgattattttagctaatttgaatatgtcgttttcttgtttttgcataacaattatgtttttacatgtagattttattttatctacatatagaagaccccctcaagggtaaaaagggggagtgggaaaagaagaaataataaaaaaaaattatagttgcattaagaatataagcagtaatgagggaactatatctttaagttggttatatagaagctttttccctaactttttgtgcgatttgacggtttcgataccaatgcctaattcttcggcgatttcctgattgcttttattttctagcacgagtttaaagacattccggcattgttgaggcaggtgttcgatagcgtcccttagtaaaatatatacctcttcttccagtatctggtcaaaatagaaactttcattagaatttaatagtacctcttgggtatatttctcctttacatcttcgtggcgtaaatgtttcaggcatcggttgtgggttgtttgataaagatatgccttcagattgtctattgattcaaaacgctcttttttttcaatcagatttgtaaagatttcctgtacaatgtctttacaatcatcaatgtctgtgacatattttttggcaaataggacaagagtcacataataatgttcgaacagaagcctgatggcatgctcgtcgtatcgcaataatttgtttatggatagattctgttcagacattgttgaaattttattcgaaaattaattatcgggtaaaattagaaattttggtattgttgcaaaagtaatattaaaaaaaagagggaacaactgtttaaaagttgtccctctatatgatttaaaaggaatgtttattacatcattcccggcattcctccgcccattcctgccggcatagctggagcatcgtcttttttctcttcaactaatacgcattcagtagttaagaacatacctgcaattgaagctgcattttccaaagctacacgggttactttcttcggatcgataactccggcaactttcaaatcttcataaacgtctttgcgggcattatatccgaaatcacctttgccttcacgtactttgtttacaacaacagctccttcaactcctgcgttacaagcaatctgacgcaacggttcttcgatggcacgtttgatgatttcaataccggttgtttcatcttctgtttcgcctttcagaccttccaaggctgcctgtgcacggatgtaagctacaccacctccaggtacgataccttcttcgctggctgcgcgggttgcgtgtaatgcgtcgtcaatacgatctttcttctctttcatttcaacctctgaagctgctccaacgtacagaactgcaacgcctccggccaattttgccaaacgttctttcaatttttctctatcatagtcagaagtagagttttcaatcaatttcttgatttggtcaattctttcctggatgaattctttcttgccggcacctttgacaatggttgtgttttctttgtcaatagtcactttgtcagcacgacccaacatatcaattgtcaggttttcaagtttcaatcctttatcttctgaagttacaacgcctcctgtcagaattgcgatatcttccagcatttctttacgacggtctccgaatccgggagcttttactgctgcaattttcaaagaacctcttaaacggtttactaccaatgttgctaaagcttcgctttcaacatcttctgcaatgattaataatgcacgtccagactgagctaccggttcaaggataggcaacaattccttcatggaagaaattttcttgtcgtaaagcaggatgtacggattttcgaattcgcaaaccattttttcgctgtctgttacaaaatacggagagatatatccgcggtcgaattgcataccaccgacagttttaacctctgtttctgtaccctttgcttcttctacagtgattacaccttcgataccgactttctccattgcctctgcaatcaaattgccgatagtttcatcgccgttagcagaaatacgtcctacctgacggattttctcgaagttgttgccaacctcctctttcatgccttccagatgttttatgatagctgcaactgctttgtcaatacctcttttcaattccattggattggctccggctgtaacgtttttcaagcctacattgatgatagactgtgccaatatggtagctgtagtcgtaccgtctccggcatcgtctcctgttttagaagccacttctttcaccatctgtgcaccaatgtttgcatacggatcagacaattcgatttctttggcaacactcactccgtcttttgtgatgtgaggagctccgaatttcttttcgattactacattgcgtcctttcgggcctaaggttacttttactgcgtttgctaactcatcaacaccttttttcatcaggtcgcgagcttctatattgaatttaatttcttttgccatgatttcttgtatttaaaataactgttatttgaatgtttgttacagaatcacaagaatatctccttgattcattaccaaatattttttatcatcaatatgcaattctgttcctgcatatttcccgaataatacagtgtcaccaacttttacttccatcggttcgtctgctttgccattacctactgcgataactacacctttttgtggtttttcttgtgcggtgtcaggaatgatgataccacctttagttactgtctctgctgcaacaggctcaacaatcactttgttaagaacggttttcagtgtcatgatattaattttttagtttatgttatttcttgatttctatcaaatttacattactgttcttatcatattctatgccaaagtaggggcagaaaatatagattaggataaatgtgtgttgtaagtgtttgatggatatatgattaattgtatttgtggactctgtggatgtcggagattatgtcagtgtataataaaaaaatgtcagcatgactgacatactgacattttttattacatgatatttttacttcttattttgcaggagtttcagttgttgcattttctgcaggagcttcctctgctgttgttgcaccagggaaggatgggatagcctgctgtaccggctgtgtattgatttgctcttggatggcagattgattaccagtttcacctctcggaatgaaaaatacggctaaaacgcataataccatcattgcacctgccaaagtccaggttgctttttccaaaaaatctgtcgtttttctgacacccataatttgattggatgatgcgaatgaagatgccaaacctccacctttggagttctgaaccaatacaatcaatatcaataaaagacagataatgaatactaaaacagaaattgctgtgtacataattactcttgattatttatgatttctttaattttctcaattcgattggcaaagtaaacacttttttccggatatttcaaacttaatttaatataagttgtaatggctttgtcatataatttttgtttggtgtatattttagccaaagtctcggtaaaaagttcgtcttgagcataagggttttcttctgataaatcacgaatatcttcggatgtgtcaggagctttgggcatactgggattgctttctataaaattatctatcagtatgttgtttttgttttttgtatttgtctgtttgtctggatctacaaaatcttcttcatcagtcagagaatagccggcactaatattcagatctataatattttcttcttcgtttcctgctattgaaggctttgtttcaatgctaccttctaaatcttcgatttgcttggcttgctcttcttgagtatatattgtaggttctacagggatgtcatggacatcggattttacattgcgaagatgcgtaccgggtagctgattcaaatagtggagcaactgcttgtgatcggtgatgtgtacggtgctgcttgtcaattcatgtctgaatcgggttcctgcctgtagatagagaactttcaggtacaacatacgtgcggcctggaaatacgggtaacgctctacaagagcctctaattcttgtaaatcgtcagtccctactttttcaggatgacgtataaattcgatgaatttttctcgtcgcataaattaccaattgacaatagctttgttgtatatatcgtcaatgatcttgtctaatatttcttcaatcaggctttcttctacagagttgaaatcgacttcggtagaatagtctgcgtaattggaaaatgtggatgaaaaatcgaatttatcatctattgtatttgtatattttacacggatacctatagtcagacggttggaggatgcgatttcgtccgatgtgatatcaatgggacgttgggaatattctgtgatttgtccttcaaatcggatgtcaccattattgtctgtcaattgggtcaagcctgttttttgacgtatatattctgtcagtttttctgtaaaggtggtactcaaagtaggcatcacgagtggagctttgtttggaaaatagtccacggaaaatgttttgatttccgggtttaacgaacctccggtcatattataagtgacagtaactcccatgaagcggcatgctacacaggataatataataataatcagtatgaaaataaatttgtatttagtcatttgctatcaattatagtgaggcgcaaaaatagagaattccttttaattttctaaattatactccttcagtttcctatataaagtacgttcggatattcccagatctttggctgccaattttcgtttgttgtgattcttttccaacgctttttttataagttccttttccttttcttcgattgagaatgattcttcaatgacagtctctgattcttgtatgtggtcattggctggcagtgttacattagagtggggtgttgttcgtccggcggtgatattggaagccgtattgtataaatcatgtaatactaaggcagtactgttttcttttactgcgccggaggtttgtggttcattttgcatcaagtcataaaccaggcgttttaaatcattcatatcttttttcatgtcgaagagaatcttataaaggatttctctttcggatgcgaaattggcctctccctgttcatggttggtgattgtaggaagcatggggtcagattccggaatgtatttgcgcaatgtcaaggcatctactgaacgttcctgttcaatgatggatatttgttctgcgatattttttaattgacgcacattgccgggccagtaaaaagcctttaacacctgtactgcatcttctgtcagacgtacgatgggcattctgtatttttcggcaaagtctgcagcaaattttctgaacaataaagggatgtcgtcttgtctttctcgcaaaggagggattgtaataggaatagtgttcaggcgataaaataaatcttctctgaatttcccgttcttgacagcctggggaatattgaggttcgttgctgcaatgactcgtacattggttttctgtacttttgaagaccctacgcggataaactctccggtttcaagcactcttaatagtcttgcctgtgtcggcaggggtaattcaccgacttcgtccaaaaaaatggtgcctccgtcagtgacttcaaaatagcctttgcgatcagaaacagctccggtgaatgaccctttttcgtgtccgaacaattccgagtcaatcgttccttccgggatggccccgcagttgactgctatataggaggcatgctttcgcgcactataagcatggataatgcgcgggaaaatttccttaccggcaccgctttcccctgtaatcagaacagaaagatcggttggagccacttgtgtggcaatatctatggcgcggtttaatgcaggggtgttgccaatgatttcaaaccgctgtttgatagcttgtatgtcttccatcataaaaatcaatctatagacctcatatactgcaaaattagcagattcgactgacaaaatagcacatccatgtaaaaagattgttaattaaaatcaagcctgtttttgtgtgaatttattaaaatgttttatttttgtctttaatcctgtcaaacagagccatgaaagaaaaagacaaatcattcttaatgcgaatcaatgctaaggagcgccaggcattccgtgaactttttgcggaatactaccgcccgttggtaatgtttgccatgcgctatttgggtgagcaggaggaagccgaggatgtggtacaagatttatttgtagccgtatgggaaaagaaagacgctttcttgtctgagcaaagtattcatgtttttttatataattccgtacgaaacacttgtttgaatctgttgaaacatcggaaagtggaggaaaaatatttaaactataatatgcaagttcatacctcgaaagaagatgatgaatacgaaatattggaagaagaattgtatgagcgtctttttcgtgtgatagacgaattgcctccccggtgccgggaagtttttttactccatttggacggaaagaaaaatgaagaaattgccgagttgttgaatatatccttattgaccgttaagactcaaaagaaaaaagcgatgagttatatccgcgaacggctgggtgtgtccgttctctttatgctgggattgctgtaataccctacttctgtttttctccttattaataatagcttaaatatagagcaagtatatgacaaatacatatcaaagataacaagtcgttatctttgtcatatagttgtgttatctttgatatatgtttgagatgaatttgagtgggagaaaagagagagaggcgatagacaaaagtatgttttaaatccaggttccattatatttttttgatttttgaaaaaaaatctgtttttcgataccccttttggtcggtcatgttgtctatggaataaaattgacaataaatgatgatcgattcacacatattaaatttattaacggagtatctgaccggggaaatatccgaacagcatcagacggaacttgagcgttggctggacgagcgggaaggtaaccggcaattttttgagaaattctgtgccgatcgttcatttcgagaacggtgggaacttcgtcagaaaatagatttgaatgcagctctacagaaatttgagagcagaacgggtgatgctttggtgttgccaatgcgaaagagatggagattatatattgcagtagcagcaatgttggtgcttgctattggcatatcatggttttatttgcggcaaacagcagagattccggaagttgccaagtcggaaatagttccaggaaatgctaaggcagtgttagtgttggcagatggagaaaaagtgaatttgggaatggaagatactttgtcagttgacttgactagtggaggacaagttgttaataatggaagacagttgatatataaaggtaaacaatcagcccagatagaatataatgaattgcgtataccgcggggaggggaatatgacgtggtgctttcggatggaactgtagtaaaattgaatgcagggtcatcattgaaatatccagaatcctttggaactgcgcagcgagaggtgattttgtctggtgaggcattttttcaagtggcaaaaagtacagttccttttcttgtgaaggttggggatttgacggtcaaggtatatggaacatcctttaacatcaacactcataaaggagatagaattcagactgtattggttgaggggaaggtgggaataaaaatggccgggaaggaacaggagtatatattatccccttctcagttggctgattttaatacgagaacaagagagatggatgtgaaagaagtagatttggcaccctatattgcttggacttgtggcgattttgtgtttgataatcagcgtctggaggatattatgcatactttatcactttggtatgatatcgaagtcttctatcagaatacttctttgaaggatttgcattttactggttatgtaaagcgttatcaggagatagatcagatattgaaagctttgtctcaaagtgtgggtgtgaagtttgaaagacaggataaaacattaataattagtaaataaaatacggaagatgttacaccatcttccgtatacagataacgaataaagagatgttccaccatcctttattcatagtagtaacttaatatcaacaaatttatgaaagaaatctggattttgctcaagctccttgggcaaaaaaaacgtaaaattttgtgtgtaatgaaactgagcgtcttttttgttctgtttttctctctgtcggtatcagctcgtgtagcggcgcaacaggagaaagtcaatctgcatttggaaaacgtttcgttgaaaacattcttccgggaagtacaaaaacagaccggtttgtattttgtttataacgacgagatttgtggagattttgggagtgtgtctattgatgctaaaaatgagtctttagtagatgtgctggaaacggtgtttacaaacaaagcttattcttatcattttgaggataagattattgttgtaaaggcgaaaacgttagcatcccctcaacagcagatgaagaaggtaaagggaaaggttacagatggtaaggggaatccgttgccgggtgttggcattttaattgaaggcactaccgttggaacaaccactgatgttgatggtaattacgtgattaattgtcctgagaaagaaaacttggcgttgatattctcttttgtgggaatgaaaacgcatcgagaggtggtaggcaaccgaaatgaaatttctgtaaagatggtggaggaagtagctgaaatggatgaggtggtggttaatggttattttactcgtaaaaaagagagtttcactggcgtgtccaaaactttttcaggagaagagttacggacaatatcgactggaagtgtgttgaatactttatctgttttggatccttcatttactaaaatagtgaataatgaaatgggcagtgatccaaacacgcttcccgagtttgaaattcgtggttcaagtagcttaaaaagtgaatttgacggaaatcctaatatgccgacgtttataatggatggttttgaggtaagtgctcagaaggtgttcgatttagatccgtcaaggattcgttttattacaattttaaaggatgctgctgctactgccatttatggttcgcgagcagcaaacggagttgttgttatagagaccgtagtgcctaaagcaggaactttacagttgtcttataatggaagtatcaattttgaagtggcagatttgagtgattataatttaatgaatgcagaggaaaagctggaatatgaattgcgttcaggtttatatagtactgacggtaaaccaggaactgttgatgggaatatggatacatataatcaaaaactacgtttggttaaagagggtaatgatgttaattggttgtctattcctgtgaaagatttagggattgggcacaaacattcaattacggcagaaggaggaaataatgtttttcgttatgcttttgacctattttattcaaatacagccggtgtaatgaagggttctaaacgtgagagttacggaggtggtattcgtttgcaatatacattaaagaaattgaaatttacgaattatacgtcttttgaccatttgagatcctttaattcgccttatgggaattttagttcctatttatcttataacccgtattataacccttatgatgaggaaggaaatataaaaagagttctatatacgtataaatattatgaccccgcgagtggctttaaagacaaaatcatgtataatgagctgtataatgctgtgttaccatctaaaaaccagcaagcaggtaatagttttatgaataattttgccgttgagtatgatattataaatggtttaaagttaaaagctaatttgtcattgagtattgataatagtaagagtgatttataccaatcttatgattatacttcttttcagggtaaggaagataaaggaagttatagccagtccaatgctaatgcattcagttatgatatcaatgtgattttgacttactttaaaacttttggtaagcatttgatgaatgctggaattgtgtataatttgagagagagtcagtacgatatgtccagtatgtatgtactgggtttcccgaatgcaaatatggaccatatttcaatgggtatcggttttcaagaaggagggaaaccttccggttcttatgatgtgactcgtttggttggtgtggttggaaatgtgagttatacatatgataatagatttttattagatgcttctattagaagtgatggttcgtctttatatggctcaaataaacgttggggaacattttggtctgttggtgttgggtataatgttcataatgaagagtttatgaagcgtcaaaatgtaattaacttgttgaaattgcgcgcatctataggaacgacaggtggccaaaaattcaatccatatcagtcgatggcgacctatacttatagtgattctaaattaagtggaattacttatagtggttatttgggagcaattctaaaagcatttggtaacaaggatttaaaatggcaaagagtggaaaagagaaatatcggtttggattttgaactttttcatcgccgtttaacgggttcgtttaacgtatatcaggatatatcgaaagatgtattggtaaatgtttcaattgctccgtctctggggtttgattcatacatggaaaatttgggagaagttgaaaataatggcgttgaattgtctttgaaaggtactttgattcagcaggtggagaaaaatatgaagtgggatattctgtctaatttagtgcataataagaataaagtaactaaaatcagtcaggcattaacggcttttaatgataagcaggatgctgaggttggtaataaaccgacggtgcgttatcaggaagggttgtctcaaaatacaatttgggtgaatgaatcgcttggtatagatccggctactggagaagaaatatttttggataaaaatgggaataagacaaatgtatgggatagcaaaaattacaaaccttggggaacgacagatcctaaattttatggaacaataggaactatgttgattttagggaattgggaattgaatgcttatctttattataagtatggtggttatctgtataatcagactttggttgataaagtggagaatgttaatccaaatgaaaatggcgatagacgaatactttatgatcgctggaataagccgggtgatgtagccaaatttaagaaagttagtgatgtttctaccactaatccaacgtctcgatttgttgaaaaggaaaattatattcagttgcaatcagtttctttaagttatgatttttatggagaaagattgaaaaagtggggtattcagcgtttaaaattatctgcgattggaaatgacatttttacatcttcaacagtgcgtatggaacgtggaacatcttatccgtatgcaagaactttttcactagcagctcaaataacattttaatatatgaaaagaacaatatatagtatgataatgttactggcgattgttttttcgtcatgtaatgattggttagatgtgtctcctaagactgaaatgaaagctgaagatatgttttcttcagaatctggttttcgtgatgcattggttggagtctattctttgatgagtcgtgctgattcgtatggtaaggatttgacatatggttatatggatgttttagcgcagttttatagtattccaaaatccgagacgaaccatacgttccgttatgcgattgcttataattatgaggaaacaagtgaagaaaaccgtatattggcgatatggaaaaatcattatacagctattgcaaatctgaatatggcattaagttttatagatgtgaacaaatctgtttttgcagatactgcagtatatgctgtttacaaaggagaaatgttggcattaagaggtttgttgcattttgatttgttgagaatgtttgcgtcttctcctgtaatggagaatggttcggggttaagttcattggctattccgtatttgaatgtttatacaaacgtagctcaaccgcaacggactgtgcaggagatattggctttagtgtgtaaagatttattagaagcaaaacgtctgatgaaagataaagaagattttaatgaatgggattcttctttgccaatgtataatcgtattcagagaatgaattattttgcagcaacagctttgttggcgcgggtatatttgtatggaggagataaagctaatgcacttgcgcaggctaaagaagttattggagaggcaggagtcgtagagaaaccgactaattatcaattaacccaaagggcggcaattgatacggatccgatgtttcgctctgaattgatatttatgcttgatttagttaagttgcaggatatgagtgaagaaaattggaacgtagattctaaaacaactttgttgagtatgacgactgcaaatcgtaatattttatatagcgtgtctgaaattggttctgactttagaactagttggctgacatctttgccgggagagatttatacattagcaaagttaagtagagtaaattatgttcctatgtttaaattgtctgaactttatttgattgctgcagagtgtgctgcaggtgatgaaggactggcttatttgaatgaattacgtgagcatagagggttgaaaagcttagctggatcagagaatttagaggagaatattttattggaatataaacgagaatttataggcgaaggacagatgtttttctattataaaaggaaaggactggataaaatcggtgttgcaaatgatgttgcaatagcggatttaaaagcaatttataatttgccgatacctttgtctgaagtagattttggaaacataaaaaaatgatgttatgaagacactattatttttattatttatcatgttgatgttgtttgcatgtagcgaaaatgatcgactaatatattctgaagaccgacatgatatatattatacattggtaacagaaacgagagacagtatgtttgtttctttgttggcagcagaggatgaatcaatcgctacagttgatatcagtttaatgggacatgtcctgaccgaaactaaaaagtttaaggtggaagtggtacctgaagtgacaacggctaaagagggagtgcattataaagcgttgcctgcatattatgaatttcctgcaggtgaattttcatatcagatgccaattactttattgaaaggggacgaatcgattaaacggacaatagtgacattggttttgcgtttggtgcctacaggtgaagtaggggtggcctatgaggagcggtctgtaattcgaatacaaataggggatatgctgaaaaagccggaaggtaaagatatgacaggctttgaaatgttgtttggagagtattctcaaactaaacacaagatgataattgaaatgactggacatgatttttgggatggaaattatggaagttatggtggaaaatacggaattatgaatgaggctgcctactatactccatatgcccgtaaattgtataaaatggttactgagacagaaataagggatgagaacggtaaaataataggagcatggcaagtcccctaaaataataatgttaaatataaacaattgattatgaaaatgataaaatatatttggttgttgttattgttgctcccgttgggatgctccgaaagagagtctcattatggaggaatagagattgatgaaattacgattgaaggtatagaggattattatgaaatagaagtaggaagccatttgactataccaactacaattactaccaaattcggtgatgcttcggatttatcatatgtgtggtataaatataatagtgaacaggttgttgctgatacactttcatttgagaaagatttggatgtcgtaataggagacgtgattcctggtgttgaaacaacattggtttttaaggttatagataatacgactggaatttatacttctatggttagtaagtttaaaacaataggtaagtatgccggtggcacattgattctttatcgtaatgacggagcatgcgatttggcaatgttgaagaaagatggttttacattttatgaaaatatttattcaattgccaatcataatgagaagttaggtgaaaaatcaaagagattattacagactaaagaatttgcttataatgcagagtttaaaagcatcatcgtaacgtgtgatgaccagacaggaggagtttcattaaatactgatgctttggtacgtaagagttatgtgcgggataattttatgataactgacgattttgaaggggatttggtagtcacggctgtatataatggaaattcttatgaatgtatgattgttaatggtaaagtgtattctcgacaattttggggagatcctttatgggctcctgaatttgtatttttgaagccgccttataattattatgcagcggaatttgcagctcgtccaacaggttcatcgtggttaaatggagggactccgatgctttatgataatgtgaacggtcgttttatgggaaattttagtggaggttatttcagcgaaataaaagagcaacaaaatgatttttctgtgtttgatcctaataatgtaggaaaaggaatggagttggttacaactggatgtgttggaagcaaattggacgatatgtatttcttaatgaaaaatacaaatacaggagagtttgttttattgagatgcaaattcagttttttgaatcctaaaacattcacttcgatttccaagactgttttagaaaagagcaagtatcccggtttgtatgcagctaaatcttttagggcaggtaataaatttattgtagaaaacagtgggcgtttccgtgctatttttaaaggtttgtctgatgtattcttttatattagtaacgataatgtgtatgcattcaatgttcaaagtttggttgaagatgtaataattaaaggtgctgataaaaattatgctatcgaccatttagagtgtaatgaagtatcgggtaatggtggtgcaatgctccaaatgacacttggaataaaggaccatagtctatctggtaagcaaggtggaattgctgtatatcgtttgagtagtattggaggattaaccgctgagtggttatactctaaaacaggattttgtgatgaagtaattgctacattggaaaaagaaaattagtgcaatgaaattacagggtataatggttggcatggctcttttgttaggagcctgccaaacaaatcaaatgaaaattgaaggcgagattggcggtaatttgtcagatagaatttacctgaaggaagtagttaacgaactatatggtgtttatcgaacgatagattcttcagaaattaattctggtaagttttcttttgtattagatagtattaaacctcaattgttctttttgggttttaacaatcaagaaggtggtttgatttttaccggagatggaacgacttctgttaaatttaatgctataaaagatggtcgtattgtttgggatgtaaaaggttctgtttggaatgattactatttgacttatatgaaagagaaatatgatatccgtaatcaacgagcaattgattctttggattcattgttttatgcagcaagaagcataaacgatactagggaaatgagtcgtataaagactatctcaatgccttattatcgtaaagcagaacaggccgaaaagcaattagatgaacgttggataaatgaacataaagaggatgtttttggaatttatctttattataataaagtttttatgcgtaaaacgtttaagacattagatgatgtggatgtggaacgaaattttttgaaatcatttggacagcaagctttattttctgcatataaagataaaatagataaacggttggccttgtatgcaggatgtgctgttggagctgtcgccccagaaattgtgggaatagatacgctgggacatccaataaaattaagtgatttcagagggaaatatgtaattgttgatttttggaattcttattgccattggtgtcgtaaagagtctccttggttacaaagagcattggttgcgtttcaagataaaaattttacgatattgggggtatctaatgatgctaaacaagaattatggctcaaggcaatagctgatgataatagtcgctggaatcaattgttagtaccacgtggaagtaaagtgatggatacatattgcataaaagcaattccacatattattctagttggacctgatgggaaaattttggcaaaagaaatacgtcatgaagaattagtggaagttccacggaaatttatggaacaataaagaaggtgtaagagggttatttaaccctcttttctattatcagtaaataatcgtttgatttctttcctttcttttgttattgtggctgtggggtgttccgttgttttgttatccaaggctataggcttcttcaaagtcatgccgttatatgattatggtatatggtatgtgtatcattcattgcaactttcggagtaaaatagtttgagtttctaaggggaatgcatatctttgcgataatcgtaagattaataataccttagtatgatgttagcagacagatatgtaaatccctatacggattttggttttaagatgcttttcggaacggagatgcataaggacttgctgataagttttgtgaacagtctttttgccggaaaagaagtaatcaaggatttgagttatttgaatacggagcattgggggaactcggaattagaccgtcgtgcggtttttgacgtatattgtgaaaacgagcaggggtcagaagggtgagtgaaattatcagtttatgatttgagttaatagtgtataatttatgaagaagattttattattgttttgtttactggggggcgcattgtttgcaggggcagagcctctgtggatgcgttattgtgcaatttctccagatggtagtaagatagcctttgcgtataaaggggatgtttatgttgtgaatagtgatggcggtatggcgcagagactgacaacggaggagggttttgaatcatctccggtgtggtcgaatgatggaaaaacaattgcattcgtttctgatagaaatggcggtcgggatatttttgttgttccagcagcaggtggtgtggcaaaaagagtgactacgcattctgcgcgggaaaatgtgttggctttttcaaaagatgataagtttatttattattcggcattgatgcaggatcctgcgagtagtgtaatgtttcctggagggtggattacagagttgtataaaattccggtaaatggcggacgtccggaactggtggttgcagctccggtagctcatctctgttttgataaggatggtcagtcatttttgtatgaaaaccaaaccggtggggaaaatgaatggagaaagcatcatgtgtcttctgttgcgagaaatattttttattacaatgcaacaactggaaagcatgagcaagtgactacgaatgtcggggaggacagaagccctttgtatgcaccggacggtaaaatggtatttctgagcgaacgtgatggcgggtcgtttaatgtgtataaaggggatgtacagtcggctgatgaagctgttgcattaacttcctttaaaaaacatcctgtgagatttttgacccaggcgaatgatggaaaactttgttttggttggcagggagaaatctatactttaatcccgggtcaaaagcctcagaaggtggctgttgaggtattgaatgatgcagaagatgatcaagttcaaacaatggccttgcggggtgcgtctgagtttgctatgccggatgccggggatgatatagccgtaatcagtcgtggtgaagtgtttgtggtttccggtaaatatggtacgtcaaaacaagtgtctcatactccggaagctgagcagggaataacgatatctccggatggaaaaactattgtttatgcaagttgcagaaccggagtgtggaatttgtataaggctacacggacaagaaaagaggatgttgatttctctcatgcaactttgataaatgaagaaccgttgtttaaggatggtgtagaacgaattgctccgtcattttctccggatggcaaggagttggcttttattgaagggagaaaggtcctgaaggtattaaatcttaaaacaaataaggtaagacagattactgacggctctcaatattatggaaccaatgactccggatttgaatatcagtggtctcctgatggaaattggtttacattgacgttgattactaatagacgggatccgtatagcgatgtcggtgttgtgtcagctaaagaaggaggaaaaatctataatgtgacaaacagtgcatattttgatttgtcaccgcagtgggtgatgggaggtaatgctatattgttcgtttctgataggttgggtatgcgttcgcatgcatcttggggtagtcagaatgatgtatatattgcctttatgaaccaagaaacaatggatcgtttcctgatgacaaaggaggagctggatttaatgaaagaagaggagaaactgaaagctgaaatggagaagaaagaggctgaaggtgataagaaaggtaaggaaaagaataaggagtccaaggatgccgggaagtcagtggtgatagaccttgaaagattgtctgagcgtattgttcgtttaaccccgatgtcgtctaaaattgcttctgctgttttaactgaagatggtgaatctctttatttcttgtctgcttttgagggaggttatgacctttggaagaaggatacaagaaccggaagtgtcaatatgctgaaaaaattgaataatccttattcttttttgatgttggataagcagggcaaaacgctttttgttttgggaagtagaccttctaaaatgtctttggcaggaaataatatgacttctcttgcggttaatctgcaaatggaattagataaagcggctgagcgcaagtatatgtttgatcatgtgtttacgcagcaggaaaaacggttctatcgaacagattatcatggtgtggatctgaaagatttgaaaaaggcatacgaaccgttcttgaagcacattaataataattatgactttactgaattattgagcgaggtattgggagaattgaatgtttcgcatacaggggctggatatagagggcgtggcgcagaaaaagcaactcctgaatttggcttgttgtttgattggaattataagggggatggtttgaaaatcgatgaggttcttgagtttggtccctttgataacagctttacaaaggtaaaagcagggtctgtcatagaaaaatttgacggagaggccgtaaaggcaggagaggattattatccattgataaacggtaaggcaaatacctctgtattggtgtctttctataatcctcagacaaaagagcgttgggaagaggtggtgaaacctatttctgccggacaacagaacagtttgttgtataaacgttggataaaaagtcgtgcagcagaggtggaaagactgtcaaaaggaagattgggctatgtgcatattgccagcatggatgatgaaagttaccgggatgtgtatgcagatatattggggaaatataatttaaaagaaggaattgtgattgatacgcgtaacaatggcggagggcgtttgcatgaggatattgaaatattgtttagtggcaagaagtatttggagcaggttgttagaggcgtggtagcttgtgagatgccttccagacgatataataaaccatctatcatgctgatttgtgaggcaaattattccaatgctcacggcactccctgggtatataaaacaagagggttgggttccctggtcggtatgcctgtgccggggacgatgacttctgttaattgggagacattgcaggatccttccatgttttttggtattcctgtgattggatatcggacaaaagaaggcaattatttggaaaatactcagctggagcctgattttaaagtgcggaatgattatgatcaggtgacagccggacgtgaccagcaattggaaaaagcagtggagcaactgctgaaggaaattgatgcaaaacccaaggaatggtgataagataaaatttgtataaagtgagagattcaggagtaactttctgaatctcttacttttttgatgaaaaagtaatgagaaaatttggtgaggataaaaatagtatgtacatttgcactccattttggagaaaagtataattaaattttaaaagagtacttgtaatgcctactattcaacagttagtaagaaaaggaagagtaaagatcgaggataagagtaaagcgcctgctttggattcttgtccgcagagaagaggagtatgtgtacgtgtttacacaacaactccaaaaaaaccgaactcagcaatgagaaaggttgcccgtgttagattgacaaacggtaaagaagtgaatgcttatattccgggagaaggccacaacctgcaggagcactcaattgtgttgatccgtggtggacgtgtaaaggaccttccgggtgtacgttatcacttggttcgtggtaccttggatgctgccggagttgcaggacgttgtcagggtcgttctaagtacggagctaagagaccgaagccgggtcaggcagctgctgcacctgcaaaaggtaagaaaaagtaaaaattagtgattaacaggaattgtgtttatgaggcgttcccgaaaaacagttgagtaaatggttgtgaaaccgttgaagaccgagaatgagggcagcttgacgaacaaattcgtaaacgaaaagagatgagaaaaacaaaaccaaagaagagagtcctgttaccggatccaaaattcaatgatgtactggtgacgaggtttgttaatgacctgatggtggacggtaaaaagactgttgcgttcaaaatcttttatgacgcactggatatcgttggagaaaaaatggctaaaaaagaagagaaatctgctctggaaatctggaagcaagcattggaaaatatcactccgcaggtggaggtgaagagtcgccgcgttggtggtgctactttccaggtgccgaccgaaatcaatccggctcgtaaaagagcaatttctgtaaaaaatatgattctttactcccgcaagagaagcggacacagcatggctgaaaaactttctgctgaaattatggctgcttacaaggaagagggtgctgctttcaagaagaaagaagatactcaccgtatggctgaggctaaccgggcatttgcacatttcagattttaatatagaaggagtagaaacgaccaatggcaaaaagagatttacattacactagaaatatcggtatcatggctcacattgatgccggtaagaccacaacgaccgagcgtatcctttattttacaggtgtaaaccataaaattggagaaactcatgatggttcagcaacaatggactggatggttcaggagcaggaaagaggtattaccattacttctgctgcaacaacttgtttctggaaatatcagggtcatgactacaaaatcaatattattgacaccccgggacacgttgacttcactgttgaggtagagcgttctttgcgtgtattggatggtgctgttgcattgttctgtgctgtaggtggtgttgaggctcagtctgagactgtatggcgtcaggctaataaatacggtgttccgagaattgctttcgtgaataagatggaccgttctggtgcagatttttttaaggcagttcgcgaaattaaagaaaaattaggcgcaaatcctgttcctttggtattgccgattggtgcagaggaaacttatcagggtattgttgaccttgttgagatgaaggcttatgtttgggaaaatggtgctatggaagcaactgtaaaagaagttcccgaaaacatgttggctgaagctcaggaatggagagaaaaattggtggaggctgctgctgttcaggatgaagctttgatggaacgtttctttgaagatccggattctatcacagttgaagacttgaaggctgttatccgtaaggctgttattgctatggatttctgtccggttatgtgcggttcttcatttaagaataaaggtgttcagaatttgttggatgctgttattgcttatttgcctaatccgctggatattccgaatagcaaaggtacagatcctcgtactggcgaagaggtgcatttcccggttgatccggaagctccgctgtctgctttggcatttaagattgctactgacccatttgttggacgtctgtgctatactcgtatttactctggtaaaatcgaagcaggttcgtatgtttacgttcctcgtacagataaaaaagagcgtatttctcgcttgttccagatgcactcaaacaaacagcaaccgaaagatgtattggaagctggagatatctgtgcctgcgtaggttttaaagatatccgtactggagataccttgtgttctgaggaaaaaccaattgtattggaaagtatgaccttcccggaaccggtgattggtattgctattgagccgttgactcaaaaagatactgacaaattgggtatggcattggcaaaattggctgaggaagacccgacattccgtgttaagactgatgaagattcaggtcagaccgttatcagcggtatgggtgaattgcacttggatattattatcgaccgtttgcgtcgtgagtttaaggtagaatgtaaccaaggagctcctcaggtttcttacaaagaagctatcactactgctgttgaacaccgtcatgtatttaagaaacagtctggtggtcgtggtaagtttgcagatattatcttccgtatggagccggcagaagaaggcaaagagggcttgacattcgttaatgaagtgaaaggtggtaatattccgaaggaatttatcccgtctgtagaaaaaggattcaaagaagctatgcagaacggtgttttggcaggctattctttggaagctttgaagattactttgatggatggttctttccacccggtagactctgatgcattgtctttcgaaatggctgctaagattggttacaaagaagctgctcagaaagcaagaccggtattgttggagccgatcatgaagttggaagttgtaactccggaagactttatgggtgatatcatcgctgacttgaaccgtcgtcgtggtcaggtagaaagcatggattcacgtatcggtgcacgtgttatcacagcaaaagtgccattggcagaacaattcggttatgtaactgttttgcgtactttgtcttctggacgtgctagttcttcaatggaattctctcactatgcagaagttcctaagaatatcgctaaggaagtagtggaaaaagctaacggacgtgtggatttaatctaaaaaattaatgtcgggagggggctcccttcccgaccgcttaaatataataaactaaaaacatgagccaaaaaatcagaattaagttaaaatcttacgatcacaacttggtagacaagtcggcagagaagattgttaagacagtgaaggctacaggtgcagtggtaagcggcccgattcctcttcctactcacaaaggagtgtttactgttaaccgctctactttcgtaaacaagaagagccgcgaacaatttttgttatgcactttcaaacgtctgatcgatatttacagctcaacagctggaaccatcgacgcactgatgaagcttgaattaccgagcggtgtagaagtagagattaaagtgtagttaacggcgagaccctatgtcgttaagatcaagaattaacctattaaaaaagaaatgaaattaccaggtttaattggaaaaaaagtcggaatgacttccgttttcagtgttgaggggaaaagtatcccatgcactgttattgaatgcggtccatgtgtcgtaactcaggtgaaaaccttagaaaaagatggttacgaagcattgcagttgggttttgatgagaaaaaagaaaaacacactagcaagcagctaagtggacactttaagaaagcaggcacaactccgaaacgtaaactcgttgagtttgctggatttgctgaagaacacaagttgggtgacgttattgatgtaacaatgcttgagggcgtttcttatatcgacgttatcggtacctctaaaggaaaaggttatcagggcgttgtgaaacgtcatggattcggtggagtaggtcagactactcacggtcagcataaccgtactagaaaaccgggttctatcggagcatgttctactccggcacgcgttttcaaaggtatgcgcatgggtggccgtatgggcggtgacagagttactgttgagaacttggaagttttgaaagtaattcctgaaaataatttgttgttggtgaagggttctgttcccggatctaaaggttcatacgtaattattcagaagtaatggagttaagtgtactaaacattgccggacaagagaccggcagaaaggtagtgttaaatgacgctatctttggaattcagccgaatgagcacgctatctatcttgacgtaaaacagttcttggccaacaaccgtcagggaactcacaagtcaaaacagagaaacgaaatttccggtagtactaaaaagttgaaaaaacaaaaaggaaccggtggcgctcgtgcaggtagtattaagaatcctgagttcagaggaggaggtcgtgtatttggtcccgtaccaagagactacagcttcaaactgaacaagaaattgaagagattggctcgtaagtcagctttgtctgtaaaagcaagtgcaaatgctgtaaaagtcgttgaagacttcaccttcgaagctccgaaaactaaagaaatggttgctgtaatcaacaatctgaatgtaaacaacggtcgtctgttgttggttttgggtaacggagtgaatgaaaacgtattgctgtctgctcgcaatttgcagaatgttgaagtaatgagagtaagcgacatcgcaacttacaacgtgatgaaggctaagaaccttgttttggttgaaagttctgtggagggccttaacgaaatgttcaatcttaactaataaaagaagagatggaaattattattaagcccgttttaacggaaaagatgacaacgcttaccgacaaacaaaacaaagttgcgtttgtggtagccaaagatgcgaacaagattgagataaagaaagcagttgaagcaatgtacggtgtgaacgttattgcagttaacactcagcgttatcagggatcagtgaaatctcgttatacaaaagctggtgttatcagcggacgtactaattcgttcaagaaagcaattgtaactttagcagaaggtgatagtattgatttttttagcaatatttaaataacatggctgtaagaaaattaaatcctgtaacccctggtcagagaggtaaagtagtaaatacttttgaacaggtgactacagatagacctgagaaatcattgttgagaccgaacagcaaaaccggtggacgtaacaactccggtaagatgacaatgagatatataggtggtggtcataaacacaaatacagagttatcgactttaaacgtgaaaaggaaaatattccggctcgtgtagctactattgaatatgacccgaatcgtactgcacgcatcgctctgttagtgtatgcagatggtgaaaaacgttatatcgtagctcctatcggtttgacagtaggacaaactattgaaagcggtaagggagttgctcctgaagtaggaaatacgttgtatctgtctgaaatcccattaggtacaattattcataacattgaattaagaccgggacagggagctgtgatggctcgtagtgctggttcttatgctcagttagttgcaagagaaggcaaatacgcttctattaagttaccttcgggagaagttcgtatggtacttgtaacctgtaaggctactgtaggtactgtatctaatccggaccactctttggaacgttccggtaaggctggtcgtactcgctggttaggccgtcgtcctcgcgttcgtggtgttgtaatgaacccggttgatcacccgatgggtggtggtgaaggccgtgcttcaggaggtcacccgagatcacgtaagggcatgttggctaagggttataagaccagagcaccgaagaaggcttctacgaagtatattgttgaaagaaggaaaaaataactgattaaattttgatgttatgagtcgttcattaaaaaaaggcccttttattgatgtgaagctggagaagagaatcctggcgatgaatgagaccaataagaaatcggttgttaaaacctgggctcgttattctatgatttctccggatttcgtagggcacacagtagctgtacacaacggtaataaatttattcctgtatatgtgactgaaaatatggtaggtcataagttgggtgagtttgcaccgacgcgtacatttagaggtcacgctgataagaaaaagaaataatagcgtgatttaagttgaacaaatgaagattgtataaaatgggtgcaagaaaaagaataaaagcaaatcagatgaaggaagccagaaaacaaaaggctttcgctgtgctgcatgattgtccttcatcacctcagaaaatgaggttggtggcagaccttgtacgtggaatggacgtacaaaaggctttggatacactgaaattttgtcctaaggaagctgctcgtaaagttgaaaaactgttgctttctgcaattgcaaactggagcgttaagaatgatggtgctcgcattgacgatgcagctctttatatcaaggaaatctttgttgatggtgctggtatcttgaagagattgcgtccggctccacaaggaagagcgcacagaattcgcaaaagatccaaccacgtaacaattgtgttgggaagtaaaactgccgttgttgaaaacactgtaaaagagtaaagcatgggacaaaaatgtaatccaataagcaatagattaggtatcatccgcggatgggattctaattggttcggtggcaagaattacggtgataaattggttgaagactataaaatcagaaaatatctgaatgcacgtctcgctaaagccggaattgcaaaaattgttatcgagcgtacactgaaactcattactattactatcaacactgctcgtccaggtattattatcggtaaaggcggccaggaagttgacaagttgaaggaagagttgaagaaaatcactgataaggaagttcagataaatatcttcgagatcaaacgtcctgaattggatgctgtgatcgttggtaataacatagctcgtcagttggaaggtcgtgtagcataccgtcgagctattaagatggctatcgcatcaacaatgagaatgggtgctgaaggaattaaaattttgatttccggacgtttgaacggtgctgaaatggcgcgtgctgaaatgttcaaggaaggaagaactccgctgcatacattccgtgctgatatcgattatgcacaggcagaagcattgaccacttatggtctgttgggtatcaaggtttggatttgtaaaggtgaagtttacggaaaacgtgaattagtgccgaattcattactccaaactcgtgacaataacaacggaagccgtccggcagccaaaggtgaaggcaaaaaaggcggttttaagaagaaaagaaagtaagtagtcttttaatcaattaaaacaagagctatgttacagccgaaaaggactaaatttagaagaagtcagaagggaagaatgaaaggtaatgcccagagaggtaatcagcttgcattcggatcttttggaattaaggcgttggaagagaaatggatcgaaggacgccagatagaagcagcccgtgttgcagtaacacgttatatgcagcgtcagggacagatttggattcgcatattcccagataaacctattactaagaagcctgccgaagttcgtatgggtaaaggtaagggtaatccagagggatttgttgcgcctgttactccgggaagaattcttttcgaagcagacggtgttccgtatgctgtcgctaaagaggctttacgtcttgcagcacagaaattacctattacgacaaagtttgtggttagacgtgactatgtagaagaatagtcttcgactattaagtttaaaattaatttgtcagagagatgaagaattcagaaattatacaaatgaccacagctgagcttagagaaaaagtagatactgaaagagctgctttgaataagctgacaatgaatcatactattactccgatggaaaatccgatgcagattcgtgctgctcgtaaaaccatcgcacgtatgatgacagaattgcgtaagagagaattaactgaaaagaagtaaagcaatggaaagaaatcttagaaaagaacgcatcggtgttgtactgagcaataagatggataaaactatcaccgttgctgtacactttaaggaaaaacacccgatttacggaaaattcgtaaagaagaccaaaaagtttactgctcatgatgaaaagaatgagtgtagtattggcgataccgtaagaattatggaaacccgtcctttaagtaaaatgaagagatggagattagttgaaatcattgaaaaagtgaagtaaccatgatacaacaggaaaccagattatcagttgcagataacagcggtgctaaagaggtgctttgtatccgagtattgggcggtaccaagaaaagatatgcacgtgttggcgataaaatcgttgttgctgtaaaaagtgcactgccgaatggtgacattaaacagggaactgtgagtaaggcagtcgttgtgcgtacaactaaggagtacagacgtcctgatggctcttatatccgttttgatgacaatgcctgtgtattgttgaacaacgccggtgaaatgagaggaactcgtatttttggacctgtagcccgtgaagttcgtgaaggttatacgaagattgtttcgttagcccccgaggtactttaattatttacgattttggatggaggatttgtggttgatacttcgatctggaatccaaagtctaaaatctaaaattttataggcgatgaatagaaaatttcatattaagaaaggcgatttagtacaggtaaatgctggtgaggataagggcaagcagggtaaagtactggaagtttttcctgagaaggaaagagctattgttgagggcatcaacatggtaagcaaacatacgaaacccaatgctaaacatccgcagggtggtattatcaagcaggaagccccaattcacatttctaacttgaatgttgttgatccttctacaggtaaggcaactcgtatcggtcgtaaagctgacgagaacggcaagttagtaagatacgctaagaaatcaggcgaaattctgaaataagaactatcctttattaggattgaaaattgtgtagcccaaggcttagttttaatactttgccttggcgcttgcatattagaaaattaatttgtagctttgccgccgcaaataaaatatgctgtgtggttacagcaaaataatgtaaactagatgaaatacgtaccaaatcttaaaacaaagtataacgaagaaattgtaccgactttgatgaaagagttcggatacaagtcagttatgcaggctccccgtttggagaagatagtaatcaatcagggagtgggttcagctatccaggataagaaaattctggagttttcaattaatgagattactgcaattaccggtcagaaggctgttgttggaaaatctacaaaagacgtgtcaaactttaagttgcgtaaaggtatgccgattggtgtgagagttactttgcgtaaagaaagaatgtatgagttcttggaaagattgatttgtagtgcacttccacgaatccgtgactttaaaggtattaacagtaaattagacggtagaggaaattatacattaggtcttgatgagcagattatattccctgaaattgtgttggattctgtacacaagattatgggtatgaacattacgtttgtgacttcggctaataccgacgaagaaggttttgctctgctcagagagtttggattaccctttaaaaagaattaaaaaccaagagaaatggcaaaagaatcaatgaaagcccgtgaggtgaagcgtgcgaaattggtagaaaagtacgctgcgaaacgagcaaagttaaaagaagaaggtgactacgctgcactgagtctcctgcctagaaactcaaatcctattcgtttgcacaaccgttgcaaattgacaggacgtcctagaggttatatgagacaatttggtattagtcgtatccagttccgtgaaatggcttcggctggtttgataccgggagttaaaaaggctagttggtaatttattaaaaacgaaaagagatgacagatccaatagcagattttcttacacgtattagaaatgcggtaagtgttggtcataaagttgttgaaattccgggttctaaaatgaaactcgagatgaccaaaatccttaaagaaaaaggatatattttgaattacaagttcgaacaagaaggcgctagaagcaatatcaaaattgctttgaagtatcacccagagactaaagtacctgcaatcaaatcattggtgcgcgtgtctaagcctggtttgcgccgttatactagtgtagagaatatgcctagagtgttgaacggtttaggtatcgctatcttgtcgacttctatgggattgatgacagacaaagaagctcgccaacgtaacgtaggcggtgaagtattgtgttatgtgtattaatttaaagtgaagaagaaatgtcacgtataggaaaattaccaattcatataccacaaggagttactgtagcagtaaatcctgataacaccgtcacagttaaaggtcctaaaggacagctttctcaaaaggtaagttctgatcttactgttactgttgaagagaacttggtgcacgtacaacgtcacactgaagataaagaacataaggcacagcacggtttgtatcgcgctcttatccacaatatggttgttggtgtttctgaaggttataccatcaaacaggagttggtaggtgtaggtttccgtgcaaatgcagatggtcaggtgcttgaacttggtttgggatattctcactctatcttcttggtattacctgcagaggtgaaagtttcagctgtaactgaaaaacgtgccaacccgattattacacttgaaagctgtgataaacagctgatcggtcaggtggctgcaaaaatccgttctttccgtaagccggagccttacaagggtaagggtatccgcttcgttggtgaaattgttcgccggaaagcaggtaagtcagctaaagtttaatcactaaaggatgtaaaaagttatggctttaactaaggaagaaagaagattaagaataaaaaggagaattcggaagattgtctccggaacagctgaacgtccacgtatgagcgtttttcgttcaaatacacagatttctgtacagctgatagatgataaagcaggtaagactctgctttcagtatcgtctttgtgcaaggaaattgcagaaaaaaaaggtaacaaaacagaacaagctacttttgtcggtgctgttgttgcagaaaaagcaaaagctgcaggtattgaaaatgtagtgttcgatagaaatggttatctgtatcatggtagagtaaaagctttggctgacgctgcccgtaacggaggtcttaatttttaataagttagcagaatggaacagaaagtaaataatactgacttggaattgaaggacagattggtggctatcaatcgtgtgaccaaagttaccaaaggtggtcgtacattcagtttcgcagctattgttgtagttggagatgagaatggaattgttggctggggattaggtaaggctaatgaagtaactaccgctatctctaaaggcattgaggctgctaagaaaaatctaattaaagttcctgttttgaaaggaactattcctcacgaacaagctgctcgtttcagcggttctgaagtattcatgaaacccgcatcttcaggtaccggtcttgttgccggaggtgctatgcgtgctgttctggaaagcgcaggtattcatgatgtattggctaagagtaaaggttcatccaatcctcataacttggtaaaagctactatcgcagcattgaaagaaatgcgtgatgcacgtactgttgctcagcatagaggaatttctatggataaggtgtttaacggttaatatttgaggactatggcaaagattaaaattacgctcgttaaaagtaagatcggtagcgataaaactcaggtaggcacaattcaggcattggggctcaagaaaaccaatagctgtgttgaacacgaggctactccgcagattctaggtatggtggctaaaatcagtcacttggttcgcgtggaagaagttaaataattgtcaaattttataaggactaatataagatggatttaagtagcttaaaaccggcctgcggctctactcatcatgagaagagaattggtcgtggacagggttctggaaaaggaggtacgtctacaagagggcataaaggagctaaatcaagatcaggttatcatatgaagattggttttgaaggtggtcagatgcctttgcagagacgcgttccgaagttcggctttaaaaatatcaatcgtgtagcatacaaagctattaacgtaagtatgttacaggcattggctgaaagagacaacttgactatgattgaccgtgatgttctgattgaagctggtctgcttagcaagaatgagttattgaaagttttgggtgatggtgctattagcattaagcttgaagtaaaagcaaacgcattctctaaaaaagcagtagaagcaattcaggctgtcggaggttctgtagtcgtgttataaaataatgtttatcgtttatctgtttattcgctaaaaatatatatttttggcgaataaatgggtaaacgataaagcagttaaatgaaagaatatgaagttatttgatacattaaagaacatttggaaaattgaggaattaaaaaccagaattcttacaactctaggtttaatccttgtttaccgacttggaacagagattgtgttgccgggtattgatccggcaggattaagtgcattacaagagcaaacagcaaataatggggtattaggtctgttggatatgttttccggtggagccttctcaaatgcttctatttttgcattaggtattatgccttacatctctgcttcaattgttgtgcaattgttaggaattgcggttccttattttcagagaatgcaacgtgaaggtgaaagcggacgtcgaaaaattaaccaaataacacgttatcttactgtaatcatcttgattttgcagggttctgcgtatcttaccaacttgcatatgcaaattcaaccggaatttttcttaatcaagggagctttctttactatttattctgttgctattttggctgcaggatctatgtttgttttgtggcttggtgagaaaatcactgataaaggtattggtaacggtgtttctattatcattatgattggtatcatcgctcgtttgccttttagcttttttgcagaacttacttctcgtgttagccagcaaggtggaggtttagtggcatttttgattgaaatagtattcttgttctttgtcttctgtggcagtattatgttagtacaaggtactcgaaaagtgcctgttcagtatgcaaaaagaattgtcggtaataagcaatatggaggtgtacgtcagtatataccgttgaaaatcaatgctgctggtgtaatgcctattatttttgctcaggcaattatgttgttaccgatttcattcgttaattatgcttctggtggtgcaatgactggttttgcagctgcatttactaactttacgggtttttggtataatgcaaccttctttattttgattgttgcctttacttacttttatactgcaattacagtaaatccgatgcaaatgtcagaagatatgaagaaaaatggaggtttcatcccaggtgtaaaaccaggacgtaaaacaatggaattcttagatacgattatgtctcgtatcactttaccgggttctattttcttggggattgttgctattatgcctgcctttgcaaccatggccggagttaatcagcagttcgctcagttttatggtggaacttctttgttgatcctagttggtgtcgttttagatactttgcagcagattgaatctcatttattgatgcgtcattatgacggattaatgaaaaacgggcgtataaaaggtaaaacacctggagggcctgcagcgtattaataagtagtatagaattgaaaattgggagtgatgtaaaattattttcaattttcaattttttcttttggaatagttttactaattttgcggcatgatttcgataaagacagacgaggagattgaactattaagagaaagcaaccttttggttggcaaaactttgggtgaaatggcaaagcatattcgtccaggggtttctactttagagttggatcgtattgcggatgaatttatccgttctcatggagcagtgccgggatttttgggatatggtggctttccaaatagtttgtgcatatccgttaatgatgtggttgttcatggaatcccttctgcagattgtgtgttgaaagaaggtgatgttgtatctattgattgtggaactttgaaaaatggctattatggagatagtgcctatacttttgaagttggtagggtagatgatgaaatccatagattgttagttacaacgaaggaaagtctatataaaggaatagaaaaggctgtggcaggattgcgtataggtgatattggtcatgcaattcaatcttattgtgaatcggccggtttctctgtcgttcgggaattagttgggcatggggttggaagaaatttgcacgaagatcctcaagtgcctaattatggaagggctggacaggggattaaattgaaagaaggcatggtgattgcaattgagcccatgattaatttgggtgaaagacatgtctatattgaagaggatgggtggactattagaacacgggatagaaaaccatccgcgcattttgagcatacattggcgataagaaagcatggtgtggatattttgtcgtcgtttgattttgttgaacaggaattagcaaggttataattctaaataatatattatagtatggcaaaacagccgtcaattgaacaagatggagtaataacagaagcattgtctaatgcgatgtttagggtagagttagaaaatgggcatgtgattacggctcatatttctggcaaaatgaggatgcattatattaaaattcttcctggagatagagtacgtgtcgatatgtcgccgtatgatcttactaagggtagaattacttttagatataaaaattgatattggtaaagcttatatcagtccttctgttgttaggaagttatagatgtaagttgtcaatatatatagtgaatattcaaaaataagaaacaatgaaggtaagagcgtcaatcaagaaacgtaatgacgattgcaagattgtaagaagaaaaggcgttttgtacgtcattaacaaaaagaaccctaagtttaaaatgcgtcagggttaatcattaatctagttaaattaaaaagatttatggcaagaatcgtaggtgtagatttaccctcaaacaaaagaggtgaaatagccttgacctatatctatggtataggtagaagtagtgcacgtgctatcctaagtgaagccggcatcgattatgaccttaaggtaaaagattggaacgacgatcagctcggggctgtacgtaaaattattggagcagagtacaaagtcgaaggtgagttgagatcagccgttcagatgaacatcaagcgtttgatggatatcggttgttaccgtggtattcgtcaccgtttaggactgcccgtaagaggacagagtacaaagaacaatgcccgtacacgtaagggtaagaagaaaactgttgctaacaagaaaaaagcaactaaataattgagttgaattatggcaaagaagtctacatcaagtaacaagaagcggctggttaaagtagaagccgtgggacaagcacacgttcattcctcatttaacaacattattatctctttgaccaactcaaccggtcaggttatttcttggtcttctgcaggtaaaatgggttttagaggatctaaaaagaacactccgtacgctgctcaaatggctgcagctgattgttctaaggttgcattcgatttaggaatgcgtaaggcaaaagtatatgtttcaggtccgggtaacggtcgtgaatctgcaattcgcgcaattcatgcaagtggtattgaagttgcagagattgttgacgttactccgctgccacataatggttgtcgtcccccgaaacgtagaagagtataaacgaataacgtgtaattgaattttatattttgattagcttgagcttttcaagatttaaaatctaaaatttaaaattgaaatggctagatatacaggacctaagtctaaaatagcaagaaagttcggtgagccgatttatggaccggataaagcattggagcggagaaattatccgtcaggacagcatggcttggctcgtcgtcgtagaaaaatctctgaatatggtattcagttgaaggaaaaacagaaagcaaaatatacttatggattgttggaaaaacagttccgtattttgtttgagaaggcagaacgtgcaggtggtgtaaccggtgaagttcttttgcagttgttggagtgccgtttggataacgtggtttatcgtttaggtattgctcctacacgtgcagctgctcgtcagttggtttctcaccgtcatattactttgaatggtggtgtatgtaatattccttcagctgctgttaaagcgggtgatatagttgctgttcgtgaaaagtcaaaagctcttgaagttattgaagagagtttacgtagcaatcgtgtgacaaaatattcttggctggaatgggatggcgcttctatgagcggtaaacttttgaatgttcctgaaagaacagacattcctgagaatatcaaagagcagttaatcgtagaattgtattctaagtaaaataattgaaatatttatggcaatattagctttccagaaaccggacaaagtaatcatgctcgaatctacagacaaattcggtaaattcgaatttcgtccattagagccaggttacggaatcactattggtaacccgttgcgaagaatccttttgtcttcattggaaggcttcgcgattaccggcataaaaatacatggtgtagaacatgagttcgcaaccattcctggagttatcgaggatgttaccgaaatcatcttaaatctgaagcaggttcggtttaagagaaaagtggaggatgtagaggatgagaaagtgacgattctgattgacggacaggaagcttttaaagcaggggatatgaataagtttctctctggatttgaagttttaaatacagaattggagatctgtcatatggatcctagtgtaaacttccagatggaaattaccattcagaaaggacgtggttatgtgcctagtactgagaatatgccggctgatgcagaagcgggatttatccctattgatgccatttatactccgatacggaatgtaaaatatgaaattgagaactatcgtgttgaaggtaaaacagactatgagaagctgttgtttgaaatcgaaacagatggttctattgcacctaccgatgcgttgaaggaagctgctaaaatattaattcatcatttcatgttgttttcagatgaaaagatttctttggagtctgaggataaatatggtaatgaggaatttgatgaagaagtgcttcatatgcgtcagttgcttaagactaaacttgtggatatggatttgtccgttcgcgcattgaattgtttgaaggctgctgaagtagaaacgcttggagagttgtgtagattcaacaaaaacgatttgcttaaattccgcaatttcggtaaaaagtctcttactgagttggaggctttgttggaaaataacaaccttgagttcggtatggatgttgcaaagtataaattagataaggaataacatcatgaaccataagaagaaatttaatcatttgagccgcaccagcgcacatagaaaagcgttgttgtctaatatggctgcttctttgattcttcacaagagaatcagtactacagtagctaaggctaaagcactcaaaatgtatgttgagccgctgattacaaaaagtaagaacgacaacactcattctcgtcgtattgtatttagctatttgggacagaaggaggccgttactgaattgtttggtgaagtagctccgaaaatcgtaaaccgtccgggtggttatactcgtattttgcgcactggtaaccgcattggtgataatgctgagacttgtatcatcgagttggttgatttcaatgctacttatactgaagtgaagcaagaagcgaagaaaacctctactcgtcgccgtcgttcttctggcgctaagaaagctgctgctgaagctgcagttgaagaagctcctaaagctgaataagacgtcagtatttctatataagcggatcttggtaggatccgctttttttatagccattttttccttttgaagaagataagcatcaacaatgctattccaatcattaccgcccataatataaaatatgacgcttcatattttagctcaggcatgttttcaaaattcattccgtatacaccagctagaaatgtcaggggaataaaaatagccgaaaatatcgttagaattttcatgacatcatttacgttgttgttaatgttggcattgtaactattttgttgatcagaaaccatcatgtaatatatttctattacttcaatggtttgtgttactagtccgtccaagtcacgcaaatatgtataagtacgtttgtttattaattctgaatcgcagttgatgaatcttgagattatttccttagccgggcgaatatttttacgtatataggataattctgttttgtagtggtaaatgttttcaataatttgtttgttgcatgtaagtaaatctttttcttgtgcttcaatattgctacctagtttttcgatgtttaaaatgtatgaatcgactagtgtatccattaatgcatagcatagataatctgttgtataattgcggatttttgcctgtttggcggagaggcggcggcagatgtcttgaaagtggtccgtttctgtttcttgtattgatataaggtagtttttgcctgcaattatagatatttgctccatctgtactttgctggctacaggatcatattccagatttttggtaatgataaaaatatgatattcgtcttctataaatttgggacgttcgtctgtgtttaatatatcttctagaatcaacgaattaatgttgaatgttgttcctaaattttcaatcagttggatatcatgtaatccaaataaagaaaaccatgtgatatgatcatctgaaagatattcagtaaggttgctaaatgattttagctcaccctctttaaagtaattgttattgtattgtcggacaatgatttttgtgtgttttagtttttgttggcctatgaatattagtgatcctggtgctgtgccttttgcttgttgtttatcttttagaaaacgtgccatgagattattattattgagtgaatctatatttgtacgtgaatggaaatacttatgttgtgtgaatactttgtactaatgcataatgttaaaaataaataattataaattataagcaaaatacgagtttttgcttatatttttgtaatagcgagaccaatttacggaaaaaatgtcgttattaaaacgtttgtgtagatgaaatatagctggtaaagtttgtttctacttctatttttgaatatttctatctgataatcagttgctttttaggatgtaaaaatacttagctggaaatttgtttagtcctaacgattagctaactttactcttgaaaaaattagtattgcactgatgttaatggtttgttaatgcaaacgttggtatttttattgcgtttactttggcaaacttcttgtattggtgtctattaactttaattggtcagtgtttattaacctacttattcaatcatgagtcaagagacaaaagttatcgaaaagcatgatgttgttatccgtttctccggagactcgggagatggaatgcaattgacagggcagcagttttcagatacagctgctttgtttggaaatgatgttgcaacgttcccggattatccggcagaaattcgtgcgccacaaggaaccgttggcggtgtatctggtttccaagttcacattggtgaggagcatattacaactccgggtgattatgcagatgtattagttgccatgaatccggcagcattaaaagctaatttgcgatgggcaaaaaaagcaggaacgattattgttgatctagatgcttttactgaaaaacatctcgaaaaagctggttatacagtaaatccgcttgaagatggttctttggctgattacaatgtagttccggtaaaagttagtgagttgacaatcgaagctttgaaggaaactggtttggaccagaagtctgttcttcgttgtaaaaatatgtttgctttaggtatgatttattggatgttcgagcaatcagtagagcatacagaagctttttttgatataaaatttggaaagaaaccggctattgcatctgctaataagttggttttacgtgcaggttataattatgctgctaatgtgcatgctttggcaactcattttaaagtggctcctgcaactattgaaaaaggaaaatatcgtacaattactggtaataaggctacagcatggggtttgttagccgtagcagaaaaagcaggtctgcctcttttctgtggttcatatcctattactccggctacagatattttgcatgaattggcattacgtcgcgatttaggtgcgaagacatatcaggcagaggatgaaataggtggtatctgtacagcaattggtgcaagttatgcaggtaattttgcttgtacaactacttcaggtccaggattggctttgaaatctgaagctgcaggtttagccgtaatggctgaattacctttggtaattgttgatgtacagcgtggaggtccatctacaggtctgcctacaaaaacagagcagtcagacttattacaggctttgtatggtcgtaatggagagtctccaatgcctgtgattgctgcaagtacttcaggtaattgtttcgattatgcatatatggcaggtaagattgctttggaacacatgactccggttgttttgttgacagatggattcttggcaaatggagctcaaccttggctgattccttctatggataaattacctgaaattaaattgcgtgtagcaaaagaaggtgatgattataagccatatgctcgtgatccggaaactttggctagaacttgggcgttgcctggaacaaaaggtttagagcatcgtattggtggtttggaaaaaatgaatattacaggtaatattagctatgttccggaaaatcaccaggtgatgactgatttgcgagatcagaaagtggctcgtattgcaaattatattccggagcaggaagtatatggaaatactgaaggtggtgatactttgatagttggttggggaggtacatatggtcatttgttctctgctgtgaaagaaatgcgtgcagaaggtcaagatgttagtttggctcactttaatttcattaacccgctacctaagaatactcgcgatatatttgcccgtttcaagagaattgtcgtatgtgaattgaaccttggtcagtttgctaagtatttgaagagcaaatatccagaattcaactatcatcaggtaaataaagtggctggtttgccctttactgttgttgaattgaaacagaaaatcaatgaattgatgaacgcttaatactattgaaatggacgaattaaaatatactcctaaagattttaaaagcgaccaggaagtaagatggtgtccgggttgcggtgatcatggaatcatcaactctgtacagaaagctatggcagaattaggataccctaaagagtcgtgggctgttatttctggtatcggttgttcttctcgcttcccttattacatgaatacttatggatttcatacaattcatggtcgtgcagcagcgattgcttctggtgcaaaaaatgctaatcgcaaactgaatattttgcagatttctggtgatggtgatgctttggctattggtggtaatcattttatccatgctattcgtcgtaatgtggatattacaattttattgttcaacaatgaaatttatggtttgacgaaaggtcagtattctcccacaacaaaattaggaacaaaaaccaaaacttctccatacggaacaattgagcatccgtttaatcctggcgagctttgcattggagctcaagggaaattctttgcacgctcaatcgatactagcgtggctttgactgcagagattttggaaacagcggtaaaacatcatggaacatctgttgttgaggtgttacagaattgtgtaatttttgcagatggtgcacattctgcagtaactgacaaagaattgaaggatgaccgtcagattgttttgcgccatggcgaacgcatgatttttggtaagaataaagacaagggtttgatattggcaaaatctggcgaactgaaagttgttgaaattggtaaagatggtattactgaagaagatattttagttcatgatgcgcataatcccaatccattcttgcattggatgttggtgaatatgaaagctccggaattccctgttgctttgggtgttattcgtgatgttgaagcacatacttatgatgaagctttggatgagcagatagaagaagtgaagaagatgtctaaaattcattgtatggaggatttgctgaacagtggtgatacttgggaggtgaagtaaaaaatactgaaataaatattttgagggttgcataagcaaccctctatttttatggaaagttgtgagcataaaaaaagccatcttacgatggcttctatttaagaatagaaatttttatttcaattttagctcagctctttcgatgtatttctcaatatctctagcttctggagcattgggatattcgcggttgatctgttcgtagcatttcaaagctcctgcataatcgccagctttttcaagagctaaaccatttttcattagaaacatgggagttgaaaaatcatttgttttagaatttgcagctttttggtagtgagttgcagcatttttgtagtctcccatttgcatatatgcatctccaatattagctagtgccatgttcgccattagtaaatcatctgaggagaatttttttaaatattgtatggcattttcatactggcctaaatgtaaataagataatcccgcataataattagcaatgttgccacttggagtagaaccatatttatctatgatttccaagaatcctaatacgttaccatctccatttaaagccaagttgaatgaatccttttcgaaataattttgagctccaaatatctggttggctgcttctgttactttgggtgtcacaatgaaacgattgtaaccgaaatatgctccgataataacgagtaatacaacgattacattaacaatcattttctgatttttttcaatgaattgctcaccgctggttaaagctccttcaagttgttcgaagctatcttcctttgttttttgttcttttgacatatcctttgttttattttgaatacatttctattggtttgcaaaaatagcgttttaaattgaatattgaaatatcagtttgattttttacgtatacatgcttaaatcatgggttaaaagagtatttttgtagcagataggtaaactttatacaggtgcaaaaagatggagttgaaagaattggatattattaattttaaaaatatagaacagacaacgttgaggttctcttctggttttaattgctttgttgggaaaaatggaatggggaaaaccaatgtgttggatgcaatatattatttatccatgtgtaaaagttgctttaacttgccggatttgcagaatattcgccatagggagcctttttttgtgatacaaggtaaatatcttttagaggatgaaatggttgatatttattgtggagtaaagaggggacaaaagaaaatttttaaaaagaatcaaaagtcttattctaaactgtcagagcatataggtctgttgccattggtgatgatatctccagaagattcttctttaattgatggaggtagtgaggaacgtcgtcgtttggttgatggaattattagtcagtgtgatagtggataccttcaaaatttaataagatataataaggctttagtacaacgtaattcattgttaaaaatgaatgccggtagaataatagacttggatagtttggagatttggaatgaccaattggcagaatatggagagaagatattacaaaaacgagtagaattcttgaaagaatttcgcgaagtatttcaaatgtattatgaagaattatctttgaagcgggagtcggtggaacttgggtataaggcgtcagttgaaagtggcggattattggaggcattgcatgacaatataaagaaggattgtatgttaacatatacaacaacggggatacatagagatgatctttccttgcatattggagggtatcccgtcaaaaaaatcggttcgcaggggcagaaaaaaacttttttagtggcattgaagttggctcaatatgattggttgtatcgagttggaatggtgaagcctttgttgttgttggatgatgtatttgataagttggatgcagatagagtgaggcagattattaggattgttagtggtgaaatatttggacaaatatttattacggatacgaatcgagagcatttagatgagattttgaaagagcagcaggtggactatcgcttgttttatgtagacaagggggaaattaatttttaaaattggtatatttgcatcctatatgaaagaagggaaaactaaaacaattgatgaattagtggagcaagtgcttcgcaatatggggttggagcaaaaatttaaagagtatgaagtttctcaaatttggccggaagtagttgggcagatgattgcttctcggacaaaacatttgaatattgtggatggcatattgtttgttacttttaattctgcggttgtaaaaaatgagatttcgatggttaaagaagggttggtgagagcgttgaatgaacgtgtcggcaagtgtgtaattagggatatagttatacgatgaagttatgaatttaatagaatcaagtgatatattaaaagcttccaaactagatcgttttggaggaaatttagggggtggcttagttgctaaatttgttatgcatattatgcgtttaaataaaataaacaagttgtatgcggatgtttataatgatgatcctcaagaatttttggagcgtttaatagaagcattaggggtgacgatagaaattaatgaagaagatttacagaaaatacctgcgacaggtagcttcataacgatatctaaccatccttttggaggattagacggaataattttgataaaattattatcaaaggttcgtcctgattacaaagtgatggctaattttttattgaaaaagatagtccctattaaagattattttttgggagtaaatccttttgaacatcgtaaggatatttctagtgcaggaggtttgaaagaggcactgcgccatttgtctgagggtaaaccattgggcctattcccggcgggagaagtgtctgcatatcaggctgattctaattctgttgaggataaagagtggagccagtcggttttgaaattaattcgtagggctaatgtacctgtgattcctatttattttaagggatctaatagtttgttgtttcaggtattgggaatgattcatccgatgttgagaacggtacggttgccgtctgaattattgaataaaaaaaatcgagttataaaattgcgaatcggttcgcctatttctgtcgacatacaaaattcgtttactgatttaagacagtatggaaagtttttgcgtgcgaagacttatttgttaggttcatcattagaggtgaaaaagttttttgtcaagtcgcaacgggcagaaaggaagatagaacccttggcaaaagcaaatccggtggaagtgcagttgcatgaattggataaaataagggaggattatttgcttttttctatgaaaaattattcaatatattgtgctcctacaatgaaaattcccaatatattgaatgaaattggtcgtttgcgtgaagttactttcagggctgtaggagagggaactaatcgtagtatcgacttggatgaatttgatttatactattatcatttgtttatttgggatgatgaagcaaataagattgtaggggcatatcgcgttggtaaaggtaaggaaatcatagatcgatatggtgttaaaggtttttatataaatactctatttaaaatacgtaaggagatattacccgttttatatgaatcaatagaattagggcgttcgtttattgtagaagagtaccaacggaaaccattgccattatttatgctgtggaaaggtattctttattttctgattaaaaatcctgaatatcgttatttaataggtcctgtaactatcagtggaaaatattcggaggtgtcgaaggagctgattatgaaatttattaagaggaatcattgggatcatgaattggccaattgcattgctcctcggtgtaaatatcaggtaaagacccatgatccaggggttgatgtgatggtggacgcttcgcgagataatatttcgactttggataaatttattggagatatcgaaccgtcgaatgataaactgccagtattgttaaagaaatatatatccctgaatggtaaaataataggatttaatatagatcctaaattcaatatgtgtttggatggattattgattttggatttgtttgatgttccgatgaatacaatcgaatcgttatcaaaggaaataaacgatgatactataatgagccgtttctctcaagagaatttagaggtttaatgataaatagaggcatatgtatgatattatttatatatttcgtggtatcttgataggtttgatggtgtcggttccattggggcctatgggggtattgattattcagaaaactttgcaaaaaggagctctcgctggttttgttgctgggatgggggcagcatttgctgatttgttttatgcaacagtggcagcatttggtttgggttttgtggtgacaaccatccagactcatgaattgctgttgcagataatcggtggaatctttttgataattgtcggtttgactatttattttggcaatcctttaaaacaaattcgcactaaaaaacgagtttctaagactggtttgttgggggattttttaacgttgttttttttaacagtttccaatcctgttgccattgtggtgtttatggcagtatttgctggggcttcagtttttggggatgatccgtctattcgaattgagctttttgtattgtctggtattgttattgggggaggattgtggtggtatactctttctactttggtgaatattttccgtaaaaaatttcgtttgcgtgttttgataacgattaatcgcgtatcaggagtaattattaccatattgggaggtttggttatattatctgcttttgggcctatccgcgcaatgttgccaggggcttagcgaatcagttgctacgtttgaaaaaatgttgagaatctccccatgatgcaagttgtacttggcatccactcttgcgtacactttctattaggcgttgggtagattcttctgcaccttcatccatgccgggtttgttttcatataattgataatttgctcgatttgttaaaggtgtaatgtttggcataatgacatttgctccaatttcaagagctttttcacgaccataagggtcgatagcttggagggctgttgttgctgctatattgatatctggcatgagtatacgtaaacaacttaccatatgcaggcctaattgtaagcgttgcttgggggttagaagctggtttcttttctcccaaagtggagtttcatgatgctcgagataagggcccattccgaccatgtcaacgtcaatgttttttaggaataatagatcattggcaagatcttctattgtttgatcagggagtcctatcattacgcctgtccctgtctgatagccacattcttggagtaagtggatgcattctagacgtgtgtgaaaattatgcaattcatctttcggatgtatcttctgataaagtttttcattagatgtttcgatgcggagtagataacgatgtgctccggcgtctttccaccgttgtagtgtttctttgttttgttctcctaatgagagggtgatgcccaaggtgttgttgcttagtttttttatttttagtaataactgttctatacgttctgtaaatgccttgtctttgcgctctccgccttgtaagacaatagatccatattgatatcggtgggcgaatgatgctgcatttagtatttcttcatcggttagggaatagcgttgtgcatgattattagaacgtctgataccgcaataaagacaatctttaatgcatatgttggatatttcaacaagtccacgcatgtgtacagaatagccaatagtggtatctcgtatatatttgctatatgcaaaaagttgctcttctgcttggtttgtacaagttaaaagagatacaagatcactgttgcaaaaagatgtttgttttagtaatgagtctatttccatagtgataaaatgtctggttacaaagatagatttttctgttttggttattaaagtttttctgtaattttgctaagtaatagcctatttgtttttttgtagaatgaaattatgaaaaaaggaattcttttgtctttgggtgctttgttgtttgttggagtaatcggcttggggatttggtatcttcaagaagaagaaaaagtgcggataaataaagacgcctttattccttacaattctgcttttgttttggcgattaatgctgagcctgaattagcgactgccgtgaagcaaaagttggctgatgagttgaagcgatatcattctcagctattggtaagggtggctgattctttaagaatgtcaggacttgtaaaaaaatatccttatgtgttggccgtaagaatacaggggaaaaaagaactaacttctctttatgtgatggacatatcagaagttttgtctcgaaatagtataccagagtatttgaatcgggtatttgctaaaggtgcagagaagatacgtaagtatgaccgtcataagatatatgctttaaatgatggtaaaaagcatgtcttttttgcagtttgtggaagcattgtgttgttgtctgattcagatatatacgtcgaggatggtttaaaacaatatgacctagaaacttcaggagaagtgattcagcatcaattccgtaatgttgataagtatttttctgcagtagcaggcataaatgtcttcatgaatacagagatgtttaccggagtgttgccggcttggtttgaagtaaggaaaatttttccaaatcttgatataactcatttgtttaaatggggtgcattggatggtgatttttctgaggatggagttttattaaatggttttatggaatatggagagtttgacaagtcatattttcaagtatttgcaaagcaacagcctcaaaatgtgtctatagataaaatagttcctgagaatatcgtagctttaagtcttttgaatataagtaaaacagaagattactttgtagctttggataattatcgttatagtacaggaaaaaaagataagatatttaccagaaagcaacaatatgtgcggatgtttgggaaggggtgtgaggaagagttgagaaaattgttacagggagagtttgcattagctaccttgtctaatgacaagatagagaataaagaggatagattggtcattgcttctttgaaatcaggaagtttggtgaagaatattttagaagggatgttgataaattacgctcagtatagcaatacgaagttgtcgtcgtataaaaaagtttatgttgtggatcgtgaaaagtcatttgattattatcatttacctgtttctgatttgtctgaagtgttctggggtgagatatttaatggctttgagggacattatgtgttggttgaagataattatctagtgcttgcgactacggctaaagcagtagaattttttataaataattatgttcatggtaattttttgagtgaagcggattggtataagaatctgagaagcaagctttcggataaatataactttgcatatattgctcgtttgccagagatgttagctatgtataaaaattgggcaaaagggccagcaaaagattttttgagcagaaatttagaggagttatctgtgtttcctgcattggtaatgcagtggtcgaatgaaggagagttgctttataatacaacgttgttaagttcaaggccaattcgaaagatggagcgtccacacattttatggcaaactcgtctgaatggtaagatatctatgaagccggttattgtgacgaatcatattgatggtagtcaagagatctttgttcaagataataataatacgatttatttaattaatgatgctggaaggattatctggaaacaggctttaaatgaaaagatcaatagtgagatttttcaggtggatttatataaaaatgggaaattacaatacttattttctacattgtcaacaatttatttgatagatagaaatggtaatgctgtaggccgttttcctttaaaattgaaatcgaattgcaagcaaggtataacggtatttgattatgataataataaaggctaccggatttttgcaccttgtttggatcgtatggtatatctttatgatttaaatgggaatattgtaagtggttggcaacctaataaagctgataaatcaatcgtgtcaaaggtgtatcatttcagaatagatgggaaagattatttggtatatgctgataaatatcgattgtatatattagatagacgcgggaaagatcgtgtaatggtttctactgtttttgatttacctgatcaagtagatgtttgtttgtctcgaagtaaaaatacatgttgtttagtatttgcaggtttggaaggtgtcattcattctgttgatttttcaggaaaagtgacattattaaagttggctagcggtatacaagataaagtggatgtaaatgtagcggatattgatagagacggtagtgacgaatgtatactgacaaataataatgaattgtttgtatatgatatgtctggacgtcttgtgttgaagaaacattgggatgagggaggtttgtgttatccatatttgtatcgtttttcaagtaatgacttgcgaatagggttgagtagttctgtgttgaaacagctatttttattgaaagcaaatggtgaaatgactgatggatttccaatatcaggagatactcccttttcaatttcattctcagatagcgatggatttaatctctatacaggtactgatgacggttcgctgataaaatatagacttcttcgttaaaattgaattttaacaaaaaacataggcaaaaaagtttgatattttctgatatttaacataatttggcacattaaaagtaaatatataatgatatgaaattttttttaggaaaaagtgtgacttttgtatgttctgtcattttgtgctgcacttcttgtggcgagacagatttgtttgatactgataaatggtctgataaaattgagggtgagtggaagccgggaataaatggagccattgcttatggaaatgtttctttgtgggatttgttgcaaaacacatctgagggagagaaatctccaattcaaaaaattcccgatcctgaaaatcggactgattcgatattggtgataaaatacacagaggaagatatctacaatatgaagttagatgaggtattccgtttagagggagcgccgataagatttgataaacaactaaatattccaacgaaattaaaagagttgttgcaggagaaaggcggacaagtagaggctatagaagaaagtgttcgtacgtttaaggatgctgtacagcaggaaataccattgtcagcagagtttgcagaatctttgatagatacgatagaattggtcatggagatggaatataattttcctaaattggacgatgtaatttatgaagtagaagtttttattggaggaaaaagtattttaactcggcaggtcggtcgtgtcggggtgtctgatattgaaagtgtcactaaagaattgaatgtgggcagcggaaatatgttggagttagaatttcaggtaaagttaatttcagggatttataaaaatgcagatttagacctaagtgtagctttgaaaaactattcttttaatgttgttaaaggtaagattttgcggaatactccaattgcaattactggagatccatttaagattgctaatgaattcttagatgaagtaaaaggggagtttgaatttttgaatccgcaggtgtttatcggtatgaacaataagggaattggggttgatgcaaatgtcaatatttcttttgctaaagaaaatggagtcaaattaacattgacagatggattattctttgaaggtaatatgagcaattctgaaaaaataatttcagatgtaatagataaaaataaagctcctaatatatctaaattcttttcattgccattgaatggggatatttcatatagtggtgatgttttctttaaccctcaaaaaagttcgaattgtattatttatgcggatggggctttagggatggatgttgatgtcataatacctttggccctgcaaggtgagttgatttatcaggatactttgacagatatagatgttgatcagaaatatgccgataaaattgaatcagcaaagcttgtattaagggcaacaaaaaatgatttgaaaatagatttgtctatacctaaaatcgtattgctgggagagacaggggaagtaataggtgaaatagaggtagcacaaacagaaggaagttgtggcgtgttaaaggcaaatacgattggagacttggtttttcagatggataaaagtactgcaaaaaaattaggccagactaagaaaatgttgctagaggtgtgtgtggctaatgacgatccaaatatgaaacctattttatcaaatgatcgattagagttttcattgttattagatgcaaaagctaatatagaagatttggatttttaagtaaggcaattaaaaataaagaggcgactataaattttagttgcctcttatttttagataataattgttgagactgattggtgtctatttattcggacattgaatcgtcaatttcaatagttgtttctccttcctctgcattatattctttgcctgcaactaagagtacaatttctccttttgctgtattttgagtgtaataggaaatgagttcctctaaggtgccacgtttgaattcttcaaacattttactgatttctcgggcaacgcatgcatatctattggcgccaaatatagtactcatttgttctaatgtttttacgatgcgaaatggagattcataaaatatcattgttcgagtttcctctaataatgcattcaactttttttgtcgcccttttttttgggggagaaagccttcgaaacaaaaacgatcacaaggaaatcctgagttgactaatgctggtacaaatgcagtggctccgggaagacattcagtttctatcccgtgtttgatgcatgtacgtgtaaggagaaagcctgggtctgaaataccaggtgtgccggcatcactaattaacgcaatgttttctcccttatgaatacgctctgcaattcgttccacttgttgatgttcattgaatttgtggtgtgatagcaaaggtgtggctatgtcataatgttttaataactttgcagatgtacgagtatcttcagcaagaatcaagtctacttctttaagaatacgtaaggcgcgtagtgttatgtcttctagattgcctacaggtgtggggataagatatagttttgccataaaatataaattggaagtcgaagttggaagacatatcttctaaattcaacagattcaatagaacaaaggtagtaaattgcttttttaaacaccagtagtgttcctaaaatatcttttttaaatttataaccaattgatatatagtgtgtaatatttttttgctgtgttttttttgaaaaaatgcttcattttttttggtaggaaataaaaatgccgtatatttgcatccgctaagcaaaacgatggtctgttcgtctaggggttaggacgcaagattttcattcttgtaacacgggttcgattcccgtacagactacagaaacgatggtccgttcgtctaggggttaggacgcaagattttcattcttgtaacacgagttcgattctcgtacggactacatattaaagaagttgaatttttatatttgtagaaatggcaaatcataaatcatcagaaaaaagaataagacaaactgcaacaaaaagagcaaataatcgttattatgcaaaaaccactcgtaatgcagtgaagaaattgcgtatgacaacagaaaaagctgtggctgtagaattgcttccgaaagttgttgcgatgttggataagctggcaaagaagaatgttattcatgataataaagccgctaatcttaagtctaaattagcattgcacgtaaataagctttaatagcttttgtagcctagatatattaggagatgagtattactcatctcctttctttgtttttattcttattaagagattgtaagatgagtaaagatggagtttatttaccaatatcttcttgggctgaagatgagcgtcctagagaacgtttattgcgacaaggggcttccgcattatctttaaatgaattgtttgctattcttttgcgttcaggtgttgggggagaatctgctttagaattgtctcggagaattttggcagataatcataatgatttgaatgaattggcaagacgaggagtgcgtgagttggtaaataagtacaaaggggttggtgttgctaaagctgcagctattgtagcagcaatggagattggtcgaagacgcaagatggaagaggtaagagatttttctataattagatgcagccaagatgcatatgaatgtattagttcgtatgtgaaggatttggatcgtgaaaaattttgtgtgatttatttggttcagagcaacaaagtaaagggtgttgagtgtatttctatggggggtattagtggtactgtggttgatattcgactgctttttaaaggagtgttggatatgaaagcaacaagtattattgtggtgcataaccatcctggtggaatgttaaagcccagtgtacaggatgaggaaacgacgcgaaaaatagtggatgcgggaaaattattagatgtacgggttttggaccatttaattgtaggagggaatagttattatagttttgcagatgaaggtaagttgtaaaagatagtgacagtttgacagagatgtaaggatgtgtggcatatagtttggggttggcagagtttttgcttattttttgctaatatcgttaagtatggatgaagtggttggaatgtgaatattaaagttgaaattttaacaaataaatatagtatcatgtcaagagaagtaaaagatgctcagaaacaagagaatattaacgaaaatgttgaggagaaggagcctgttgagggtgatgtcgtaggaaaggaaaaaaatgatgcagatgataaagaacagcaatttgaagatttggggcacaaattagcagagattaatgataaatatcttcgtttgtctgcagaatttgataattatcgcaaacgtacattgaaggaaaaaatggaattaatgaaaaatgctggtgaacaaatattggaaaagattttgccagttatggataatttcgaacgggcacttcaaagtatggaaacagcaactgatgtacctgcactacgggaaggtgttttgttaatttatggagcctttaaggattttttatctcagcaaggggttaaggaaatggaatgtataaatacagattttgatcctgatacacaagaggctgtcactaaaataccggctccaacagaagcgatgagagggaaagtggtggattgtattcaaaaaggttatactttgcatgacaaagtgatacgttttcctaaagtggtggtaggcgaataattcaaatttacaagtaatggcagaaaaaagagattactacgaagttcttggtgtgtctagaaatgcagaagccgcagaaattaaaaaggcttatcgtaaattggcactacaatatcatcctgataaaaatccaggaaataaagaagcagaggaaaaatttaaagaggctgcagaagcgtatgatgtgttaagtaatgaagagaaaaggagacgatatgaccaatttgggcatgcaggtttaggtggagctggtggttttggagggggggggatgagtatggatgatattttttctcattttggagatatttttgggagctttggtggttttggcggttttggaggagggcgttcagctcgccgtgtgaatcgaggaacaaatctgcgtgtaaaggtaaaactgaccttagaagaagttgcaaccggggtggagaagaaaattaaagtgaagaagtatgttgcagatgaccattgtcatggcacaggagctaaaaatggaacttctttttctacgtgttctacgtgtcatggcacaggacaggtaacgagagttcagcagactattttgggtgctatgcaaacaacttcaacatgtccgacttgtggaggagaaggtaaaataataaatgaaaagtgtgagcattgtaatggagagggggtacaattgtcagaagaggtgattacattgaatattcctgcgggtgtttctgatggaatgcaattgtctttggcgggtaaaggtaatgcagcacgtcgtggaggagtgaatggagatttaattgtgctgatagaagaagtggagcatcaagatttagtaagggatggtaacgatttgttgtataatacttttattagttatcctgatgctgttttagggacatctgtagaaattccgactctggaaggaaaggtgaaggtaaaaatagatgcaggaatgcaaccgggtaaaatattacgtttaaaagctaaaggtattcctgatgtaaatggctatggaaaaggtgacttgttgataaaagtgaatgtatggattccaaagaatctttctaaggaagataaaaaaatagtagaagaattgagggaacgctcttttgtgaatccttctgctggagaaaataaaaaaggtttttttcgaaaaatgaaagatttctttgaataatagccagaagaatgataactctaactcaactagaatatattgtagcaattgatgagtatcgtcattttgcgactgctgcggagaaatgttttgttactcagccgactttgagtatgcagataaaaaaaatggaagacgagttgggggtgataatatttgatcgttctcgccagcctgtcgttccgacagatataggtgcaaaacttatagagcaagctcgactaacgttggcttcatcagaacggatgaaagagataataaaagaagagcagcagaaggttgagggagagttaagaataggaataattccaactttagcaccttatttattgccattgtttataggtcaattcactaaaatatatccaggtataacggttgaggtagaagaagttgtgtcagaagaaattattcgtaggttgaaacatgacttattggatgttgggctttttgtcactccatatggcgatgaaaaaatagtggaacgtccaattttttatgaagaaatgttagtgtatgcacatccagatcattctttactgaggcagaaagaaattcgtttaagagatattgaatcttcagaaatttggatgttgggtgcaggtcattgttttcgtagtcaagtagtaaatctttgtggtttttctgttcatgctcaaaaaaaattaccatttcgttttgagagtagttcattagaaacgttgatgcgtattgtagatgttgagggtggatttactttaattccagaattggcgttgcaatatatgtcagaaaaaatgaagctacaagttcgttcatttatacatgaaaagcctttgcgagaagttagtgtgatttattctcggtattatgctaaacagcgattgattaatttgctgtgtgatgaaattggtaaaatcgtaccttctaaaatgttaaatcccaatcgtggtatggtagttgagtggaaaaggtaactgatattgtaatattagagtaatattgatggatattaagatataaaactaattagaagtagttttaaaacaatatgaaatattggggcaatattttattctggtgtagttattcgattagcattcaagaggtttgtatgaaaattgcatatgtttgacaaaatatgcataaaaaattttttatgtttaagtagaaagataatttagacacacaaaacatatttataatacttattgattatgggaaataagattaatgatccgatagcgcgtttaatgggattgcgttataaatcgcatccttggcatggtattgaagttggtgacgaagcaccagaagtcataacagcttttatagagatggttccgacggataccgtaaaatatgaactagataaagtttgtgggtatataaagatcgatagacctcaaaaatactctaatgttgtaccggcgctttatggatttattcctcagagttattgtggcgatttagtggcagaatatgccatgcaacagagtaaacgcactgatatcaaaggtgatagtgacccattggatatctgtatcttaacagaacgtacgattgctcatggagatattatagcccgagtacgtcctattggtggttttcgaatgtttgatggaaatgaagctgatgataagattattgctgttttgaagcatgatgcaacctataatgtttataatgagatttctgaattacctcatattgttgttgaccgtttgaaacattattttttgacatataaagatatgcctggagaggaaggacaaaaaaaagttgagattacccatgtatatggtcgtgaagaagcttatgaagtgattagtcgttctcttgaggattataaaaatcattttgctggtttggatgatattttgagcagggtttaatcctgctcttttttaatgcattccccagttctctttatcaagagaacggtattgtatcgcttctgctatatgttgaggtgttatttcaggactatcagcaagatctgcaatagtacgtgatagttttatgattcgatcataggcacgagctgacagaccaaatttttgcatagctagttttaagaggctaatacattgattatttaaggggcagaattttttaatcaacgttgggttcatttgtgcattgcagtgaatgccaggataatttttgaaacgatttgtttgaatattacgtgctgcaataacacgttggcgaataatgtcactggattctgcatcttgttttcctgttattttttctaattcgacaggtactacttctagatgtatatcaattctatcaagcaggggaccagaaatttttgacatataacggtgtatgctactagctgtacaactacattcctttgtgggatgattatagtagccacatggacatggattcattgatgctacaagcataaaattagcaggataatcaacagaatagcgagctctactgactgttattttgcgatcttctagaggttggcgcataacctctaaaacagttctctggaactctgttagttcgtctaaaaacagcactccattagttgccaatgagatttctcctggacgtggataggctcctcctccaattagagcaatgccggatattgtatgatgaggtgctctaaatggtctattggtgataagtgggcaattacgagataattgacctgcaacagaatgaatttttgtcgtttctagagattcttctatggtcataggaggaagaattcctggtaaacgtcttgctagcattgttttaccagaacctggggctcctatcatgatgacattgtgcatacctgcagcagcaacttctaatgctcgctttacattttcttggccttttacatctttgaaatcgtaaaatgtataatcttccgcttgatttgatgtagaggagaatgctataggttgtttgtgttgaggattcttaatgaattcaataacttcatgtatatgggaaaaaccataaacttggagtccattgacaacagcggcttcatttgcatttgcgattggtaggatgattttttgaaatccctcatcatgggcattaatcgcaataggtaatactcctttgaccggcattaaactgccatctaatgataattctcctaaaataatatattttccccaatcattaaatgttaattgttcattagcggccataatgccaagtgctaatggtaggtcataagaagaaccttctttttttacatcagcaggggccatattgataataactcttttacccggtatgcgactgcctatttctctaagtgcagaatcaatgcgttgttgactttcttttacagcattgtctggcaacccgactataatgaattttgctccgtttaatatattgacttcaagagtgattgttgtagcctcaataccattgacagctccactatatatctttacaagcataatatttaaatattgaattacaaagtgaaagttacaatatattcataagtaatacaaatctaaattatgagaattattgatttgtttttaaatatacttgctccccgtcaaaagtggcataagtgtaataagttatccaatcacctgtattaatgtatttagagttagaattgagagataaatctatgggtagatgtctatgtccaaaaataaagtaatcaaagtgtttttgttgaagcacttgtttacaaaagcgaacgatttcttcttgttcatctcctcgatataaatccgcttcaattttaccattttctaagcgagaatgagaagaccatttttgggctaacgcaattcctaagtcaggatgtacccatcggaagcaacgttggagaaagcgattgtgaaagatattgtataagaataagtagcctttatctttgggatttaaggcatctccatgtcctaataaaaaatgtttgttgtgtatttgaaatgcttggttgtgagtgtgtaatgtgattccacattcttgtggtagatagtcaaaaacccaaatgtcatggttgccggtgaaaaagtggacaggaattccagaatctgtgaattcacatattttggataaaaagcggatatgtcctttaggaacggcatgtttatattcaaaccaaaaatcgaaaatatcccctaataggaagagggctccgcagtttggacgtattttttcaagccacattataagatgttgctctcttgccgtattgtttttcagtgttgaagctcccaaatgtatatcggaaagaaaataaattttctttccgatagggagtgttaatatattttcctgtgttggaattattaaattattgttgctcacgggttatttcatcaaatcgttcaatcgctcttctaagcgtcttcctgttagatttttaccaacaatctcaaatttaggattgatgatgtaattggctggaatattttgaatattccaagtttgtgcaatacggcttctgagtccttgtggatcacggacacatatccaattgatgttttcttgttggactaatcgttcccaaagagcttgattttcatcaagacatacttggtatatttgcaatcctttatttttgaatttttgatatatagtcttcatttcattgatatatgcactgctttcttttgcagccaaaagagtgaaatctaatattatatatttcccttttagcgaacttaatgcaattgtgtcttgtttgctgttgggtaaattgatttcgggaagcgtattctctgaattttcaatgagttgtctgattcgttcgttttgaaatccttttgcaatttgttccaggtgttttaaaattgcttttgtatattgtgattcagggtacatagcctttaatgatgaagctacaatcttaaatgaatgtaaatcttcggtaggagtaagaatgaaattgtctttgtcgaatttttgataaagagcataatatgaggctggagaaactgcatgttttaatataaagtcttttgaaaactttatttgtttattaatgatagaatcccacgtctgaagtaaacggtgccgttctgtatcgtatgttttgtctgctgctaaatttgtatagatgtttcgtagagaatccaattgggtgacggtgttgtttaattggaagtttagtaatttgacccaaagtgaattttcagatccatctacccaatagttttggcttaatcctttgaatgacccacttagttctatattttcatctgcttctgcaataaaagtgattgcttctctagggccgactttaacattgtaaaatgtaggttgttccacaaatgttttgaatttgaattctccatttttattactttctgtggaatcaataattacagtattatcaacattcagttgttctaaatagattttttgcttacctgcttctttgatatgtccagtgatgtttacattggttttattgcacgaagctaatagaagcacaatggctgcggaagaaataatagtctttatcatttgtttaaaacagtattagatgatagataaattcagcaacgaaaatacaatttttttgtattatgcaaaagcattctttgtctgcatatggaatatattagaatgttgttaaatttttgtcaagaaggccctgtatattggttgaatattgctaaaacatatatatttgtccaatatgattagagtgagcataaaaatattccactattttatcctattgattacagggatagctctcattggagtcaatgttcggcttctacattgctgtcattcagaaagtagtattgtagaagtgagaatgatgcctgatgaagaggagatgccttgtagtgatgattgttgcggaaaaaagcagtgtcatactcattcacagcataatttttataaaataactgacttttctcgggttgaacctaatttttatcttttgcatattgtttgtattctgccacaaatggtagaatatgtacctttgatattaaatgttttaaatcaagcggttaaattagaaggcacgaaatcatatcttgatccgcctgcttgtgcgtttttatgtacttatctttgttagcctattattttaatagggtagttcttgctgcctatagagtggtgtggggtgttgtaatgacacaaagaatgtagattatattttttagtatatagcaatagaaatgaaatttttatttttaatcgctttgttagcaatggtgactacaactatggctcaaagcatcaagggacgtgttgtcgaggaaaatggtggtaaaaaagtaagtttaccaggtgcaaatgttgtttgggaagggacaacagaaggagttgtaacagatgaaaatggtcgatttgaattaaaatggcataatgtaggtaaattagttgtaagttttataggttttcaaacagtagtagtgcctgttagcgcttcggataaagagattgaaatattgctggaatctggagaagttctagatgaggttaaagtaatgacgagaggtaatacaacaatcatgagtacccgtggaccgattatagaacaagtgataacaggagaagagctttgtaaggctgcttgttgtaatttgggggagagttttacaactaatgcttctgttgatgtggcttatgcagatgctgtaacaggagcaaagcagatacaattgttaggacttacaggtaaatatgtacagatgatgaccgaaaatatgccaaatttccggggaatttcttctctttatggtttgaattatgttccaggcccatggatgagtgctatttctgtatctaaaggagcaggatctgttattaatggttatgaggctattgccggtcaaattagtgtggattataaaaagcctacaacaagtgagaaagtatttgtgaatggttatggaagtagtgaagggatgatagagtttaatgctaacacgggtattattctgaatgataaatggagtactgccttattagtacatggggattggttgactgtagaccacgattctaatcatgatggttttttggatatgccggaaaagaagcaatataatttaatgaatcgttggcagtataaaactgataagtggaatttgcagtttggcgggaagttccttgatgaaaaacgacttggtgggcaaaaaggttttaagaggagtatgcgaggtgagtatggtgtagataagttatatggtataggtattgattctcgtagatacgagggatttcttaaattggggtatttgatgccacaatatgaaaataccagtatggcatggattgtcaattataccgatcataatcaagactcatattatggagcgcgcgattatcaagctcgtcagcagactgtttttgccaattatatttttcagtcaatctttggtaataacgaaaatcaaaagtattctgcaggtgtaacgtttaattttgaccgtttcgacgaatcattcaatgactttgatattttagctcttaaatccactaaacgagcagattttgtgcggtcagaacgggtgattggtgctttttttcagtataccggtgctttttggaaaaagctgacagtaatggctggtttgcgttatgactatcataatttgtttggaggatttgttactcctcgcttgcatttggcgtatgctccagatgattttactatgttaaaattttcagcagggcatggcgctcgaacagcgaatatattggccgataatagctatcttcttgcatcaactaattctgtgtatgtaaataataagctgttggtagagcatcccgaagagttagaccgtctggatatggagcaggcatggaattttggggtgcagttaaatagaaaattcattctgtttggtaggatgttgaatattaacttggattattaccgtacagattttacaaatcaagtggttgttgataatgaaacggaggcgggtaaggttaatttttataatttggatggagattcttattccaattgctatcaggtggaggtgaagtatgagttaatacctcgcttggatgttacaggagcttatcgttataatgatgtcaaaagtacgattggcggtgaattgaaaagagctgctttgcagagtaaattcaaaggattgttgaatttgtcttattatacaaatatgaaaaaatggcagtttgattttactgcccaatttaatggacccggtcgtatacctttgaatcctgctattccgtctgatcggcaaaatgacgaattcgacacttttaccgtgatgaatgctcaggttacaaaatttttccgcaaatggagtatttatgtcggttgtgagaatttaggtgattttactcaaagcaatcccatactaggggctgataatccttggagtagtggttttgattcttctaaaatttggggccctgtgcatggtcgtaaattttatgtaggagtgcgttttgcgattgatagggattaattttttttagatgattgattattttgatttttaatacaataaaacgaaaaacaatgagaacaatccgctttgtattgatgttggcatttatgttgattgctgcagtatctgttaatgcagaaaaaaaaggagaaaagactgtgatatttaatgctaatcttcactgtaagtcttgtgtcgcaaaagtagagaaaaacattccttttgaaaaaggagtaaaaggccttaaagtagatatggaaacacagacgattacaattacttttcgtgaagataaaaataatgaagagaacttgaaaaaggctattgaaaaattagatattcaagtgaaaggcactctggatgctgttccagagaaaaagactgattcttgctgcgaaggcaaaaagtgtggtaataagtagccgaaaatagaaagagctgcttaaataaaaagagtccgacattatgtcggactctttttgttgtaacgtgtttttttataaatcgttatatttaccttctttatcaaaggcttcgagagctgcatttactcccggagtgtcctctttataagttacaccaaaccatttggcatcggtttttaaaacttttactttagctactcctgttttaagggcttggtctactactttgggtatataaaattccgattttaaattctctttgttggcaggataaaattcaacaaactgcttttctatttccttgaagatattgggagtaaatgcccaaaaattcattgaaaccagatcatctgcctgtaagatcactccgctttcttcgtctttaatcgtaccatctgcttgagctgcaatctttgtacgctctgttacggtagttagatgaccgttagagtctgattcgcagacacctcttgaaacagtgccattttcagagagcgtggaagccaaacgatatccgaccaatccatattcttggtcattcgcttcgttggcaagaaaatcatgtgctttaacgaaagcgtcactgccatagaagtcatctgcatttaaggctgcaaatggttcgttgatttcatcttttgcactccaaatagcatgggcggtgccccaaggtttttctctttcaatgggaggcattccgccaggcaggcggtccatactttggtagcaatatttagtttcaactaatccttctgaatacttgccgacaaagtcaataaattcttttgcaaaactttctctgataacaaaaacaatcttatcaaagcctgcgtgtacagcatcatatactgtatagtgtaataatgccttttggtgaggtccgagtggggtgatttgttttaagctcccgaatcttgaccccattcctgctgccatgactaaaagcgttgtcttttttttcatatgctttccttttatgttgtttaatggtttttgcatgattagtgatactcttttttaaagagtatcaccgtgtttgtgtacatatttggcaaatacctccatagcttcatattcagccatgcctaagcggttgtatatatctgcagtatttctgttgcggtcctctgctctttgccagaattcacgaggatcatcgcctgggaaggccggtccgttattctgtgagccgtggcggtagatagacttgcgtttaattgctaattcagccggactgataggtactgccatatctactttttcaatttcccattccatccatgctccacgataccaccatgtattacattttttgaaccattcgtcttcatcaacgatattgtatgcttttaaaatagcatcaaggcatactccgtgtgtgccatgaggatcagcaaggtctcctgctgcataaatctgatgaggttgtacttctcttagtaattttacaatgatgtcaacgtctgtttggctcaatggattcttttttacagtacctgtttcgtaaaacggaaggttcaagaagtgtactctttcttctggtactcccaagtaacggtctgctgcgcgagcttctgcacggcgtaaagctgccttatattttaacaggttggaagcttctgcttttccctcttgtttggacaagatgtcttcttttatttgagtaaaaacctcttccatcttttgaagatctcctccgcctattttcgtaaaggcacatgcaatatccatttgttggtatagatagtcgtctaatacagcgatgctgccggatgtttgataggcaacgtgtacttcatggccttgttctaccaagcgagcaaaagttcctcccatagagatgacatcatcatctgggtgaggactgaagattaatactcgtttcggatatggagtggcacgttccggacgggtagaatcgtctgcattgggtttgcctcctggccatccggttattgtgtgttgcaggtcgttgaatacttgtatgttgactttgtttgccgacccaaatgtttttatcaggtcagtcatgccgttttcaatatagtctttgttttctacctttaagatcggtttaccgactttctggcataaccaaataactgctttgcgaatcagtttgtcgttccattcaactttgctgaccagccatggtaaatttgctcgcgtcaaatcttctgcggctttttcatcaatgacgaattgaacattgggatgcaattgcaggaaggttgcaggtacagaatctgatacacttccttctacggttgctttgataatcggagctttcttttctccccaagccattaaaatgattttgtgtgctttcataatagtaccgacccccattgtgatagcacgtgtcggaactttttctcttccgccaaagtcgccagatgcatctttgatggtcaaatcatttaggtaaaccatgcgggtcgatgacgaaagggtggagcccggttcgttaaagccaatatgtccggtacgtccgattcctaaaatctgaatatccaatcctccggcagcttcaatggctttttcgtaatttttgcagaattcttctatttgttctttgtgtagagtcccgtctgggatatggatgttggcagggtctatgtctatatggtcaaacagatgatggtgcataaaataatgatagctttgctctgactctttaggcatgggcaagtattcatcaagattaaatgtcaccacattgcggaatgatagtccttcctctttgtgcatacgcactaattcctgatataattttataggagaagagcctgttgctaatcccaaaacacattgtttgttttttgtagcttttgtacgaattaactctgcgatttcttgtgcaacagcttttactgcatctgcaggtttttcgtaaatactgataggcagtttctcaaatctgtctgctccttcgcctctggcgatgtaattgtttgttttcatagacaatatatattgttttaactagtacaatgaaaagttactttcactgtcgtaatataagtgttccataacaagactaagtgtccctagtatgcaagcgtcttctgctaatgaacttgttttaagttcacattgacttttcaatcttgttaatgtgtatttatcaatagaatgttgtatggatgatagaatgatatcgtgtgctttggtgattttgccgccaattacaatcaattcgggattgaataaatgtatcagaccagctaatgcttcgccgatatgttcgctggcacgttgcaataattcaatggcaaaaatatcatcttcttgtgctgcttggataattgattcaagcgttacatcctcagctcgtttggcgatggctgttgctttgccggcttcaatggctttgcgggctgattttacaattgatctgcctgctgcaactgtctccagacagccgattttgccgcaataacacaattcttctgttcccggaatgcgaatatgaccaaattctccggccatccctttaaatccgctataaggccttccgttgagaatcatgcccatgccaatacattcactgatacttacacacaaggcatgagaagcgtcgcgtgcattgccgaaagtgtgttctgccaatgccatcgtgcttgagtcgttgtctataaataccggaatgcccagcattttttctaatttctgacggatattgcagtcatcaaaacttaagtacgtaaaagaattgccctctttgtcaattaaacctggcaaagaaactccggctacttttatcttagctctgggaatttttaaatcaatgaggcttttttcgattttttgctgcaaatcttgtaaaatagctgtgttgtcatgactttccaaaatggaaggaaaggtttgaacactacctatgacctctttgcgtaggctgaatatggcgatttttaattgttcgcgtcctaaatctatgcccatgatataggctgcgtctggatttagtgcaaaaatatgaggacgcttgcctccaattgaggctccttgaccttgatcaagcacccaaccctcttctattaattcatcgataattttactgatggtgggagttgtcatgttagttaaacgacaaatttcaggttttgataaggtttcaaagcggtaaagatcacgtatgatatctttcttttgttgatagcgtttttctttcagccccggaagggtatgtttgttttcggtttgcattatgtatttaattctattattttattgattaacttattggtatatgtgagctttactcctattgaagcatacgtcaactattatcgctgaaataaataaatggcgtattactataccacataaatttaaacttcattctgttcacaaagatataaaaactttgtaaaataattgcagaactctgtttttttaattctaaattttgatgaggtttgtaatatttgcagttgtagtttataatgaatccatttaaacttccttggctgcaagttgtccgcaggccgcatcaatgtcttttcctttgctgcgacgtatgttgaccaccatattgcaattttccaggtattttacgaattcatcgcattttttgtcaggactgtgttgaaaaccagaaccttcaacattgttatattcgatgaggtttattttgatgggaaattgtcggcaataaaaggctaaggccttggcgtcttccaaactgtcattaatgtcttttagcagtaaatattcgaaagtcggacgtgtccctgtcttttcgacaaaatatttcagactgtctgccacctcttttaaggaataagctttgttaatcggcattagcgaagtgcggacgttctctttggctgcatgaagcgatacggcaagattgaagcgtacgccatcatctgccagttggcggattttatcggggatgccggctgtggatacggtgatgcggtagggtgacatggcaagaccgtcttctgctgtgatgcgttcaatggctgccaatacattgtcgtaatttaacatgggttcgcccatgcccatgaagacaatgtttgaaagcggaaatccttgggcttctgcggccattttagcagcagtcacctgattgaaaatctcgccgtaagtgagattgcgtttgaatcccaaagtgcctgttgcgcagaatttgcagcctaatttacaacctacctgcgaagatacgcatacggtaaatttctgatttcctggaatgagtacgctttctatgatttcgccgtcatataatttccaggctgtttttgttgtgccgtctgttgctgtctgtatgtggaccggctccaggcaatcgaaataccagttttgccttaacagttcgcgtgtcgtacgcgataaatttgtcatctcttcaaagtcagtaacgccccgttgccaaatccattgccatatttgtttggcccgaaaggccttttctccgttagaaacaaggaaattagtgatatcctgtaatgacgcttgtctgatgttgtgagatgaattgtccataaaactattgtaatgaaagtgaatgtgtttgcaaagatagtcaactctttgttaaaataaaatgaaatcctggttacatgcagatttaattatatttttgtcttgtaatagaaaggtgagttataatttttcacgaaaacgattgtttttaattaaaatgtataactttggggtgcgaaaaatagaatttaataacactataatttacatgaagaggattatcattattgcggctgctctgcttgccgtatctatggcaaaagcagatgaaggtatgtggttgctttcgcgtttaaagcagcaaaacattgaaaaaatgcagcaaatgggcttcaagcttactgctgaagatatttacgacatcaacaaaccgggcatcaaagatgcgattgttggtttgggtaatgaaggacgtccgttccgtcacttctgctcaggtgaaatcatttctccgaatggtctgttgttgaccaatcaccattgcggtttcgatgctatccaggctcattcgtcagtagagcacgactatttgcgtgatggcttctgggcttataaaatggaagatgaattggcaaatccgggtactactgcttctatcttggagcgtatggaggatgtaaccgaccgcgtgaatgctgtgttgaatgataaaatgaatgaggcagaacgtgaagctgctatcgctcaggtttctgcagaaattataaaagaagctactaaaggtactaaattgagcggacaggtacaggcgatgtttgaaggcaatcagttcttcttgttcttgtatactatctacaaggatgttcgtttggtaggagctcctcctcagagcatgggtaaattcggtggcgacacagacaactggatgtggccgcgtcacactgcagacttctctatgttccgtatctatacagctccggacggaagccctgctgaatattcaaaagataatgtacctttgaaaccgaaacatttcttgccggtatcaatcaaaggcgtgaaagatggtgattttgcaatgattatgggattccccggaaccaccgaccgttactgcacaagctttggtttggagaatacaatggatgtaaccaatacaatccgtcataaagtgcgtactgataaattggctatcatgcgtgaaggaatggaaaaagaccagaaaacccgtatccaatatgcttctaaatatgccagctgtgccaattactggaaatattcaaacgagcagaataaagctttgcgtaatttgaatacaatgggcaacaaacaggctatcgaacgtgaatttacagcatgggtgaatgcagatcctgctcgcaaggctatgtatggaactgtattgtctgatatcgaacaagcttacaaaggattgaaagaattctctgttgctgaaacatatgcccaagaagcattggcaggaccggaatctcacctgtttgcttatcaggctggacgtggaatcgaattgcttggcaaagctgaaacttctgataaagaaaaagaggctatcaaggctcagcttggtgaaatggcaaaagcattctataaagacttcaatgctgatgtagatgctaaattgtttgcagtattgttcaaggtgtatagcgataatgtgagcgaagaattgcatccggaagtaattaccttgattaataaaaaatacaaaggtgattataacaagtatgctgctgagttgaaagctaaatcagtatttatgagcgaagaggctttcgctgcattcctggcaaaacctgatatgaaaaaattggcaaaagatccggtttatcaggcaggaaaatctttctatactatttatttgaaattatctacaatgaccaaagctattcgtgagcaaatcacacgtggcaaccgcttgtttgtgcgtggattgatggctatgaatcctgacaaggcatgggctccgaatgcaaattctactatccgtttgacttacggaaaagtaggaagctacaaacctcgcgatgctgtcttctatgactactatacaaccttggccggtgtgttggagaaagaaggtcctgccggtggtgaatttgaggttccggcacgcttgaaagaattgtatgctaagaaggaatttggtccttatggcaaggatgttctgcatgttaacttcatcacagataatgatatcacaggaggtaatagcggttccggtgtaatcaatgctgaaggtcatttgattggtactgcttttgacggcaactcagaagctatgtccggtgacattgattttgaagaaaatctacagcgttgtatcaacttggacactcgttatatgttgtggattgttgatgtatttgctggagcaaagaatttggttaatgaaatgactattattaaataaaagtactggctactatgaaaaatttagattggagtaaattgtcttttggatattcaaaagctgattacaacgttcgttgttattacaaagatggtaaatggggagaattggaagttaccgattctgaaatgttgaacattcacatggcttctacctgtcttcactatggtcaggaagctttcgagggaatgaaggcattccgtggtaaagatggtaaaatccgtttgttccgttgcgaagaaaatgcaaaacgtatgcttagctctgctgagtatgtgatgatgcaggctccttctgtagaattgtttacagaggcagttgttaaagcaatcgaaatgaacaaggagtatgtgccgccttatgaatcaggtgctagcttgtatattcgtcctttgttgattggtgtaggacctcaaatgggtgttgctccggcaaaagaatatttgtttgttgtattcgtagcaccggttggaccgtacttcaaggctggtttcaaaccgactaaagtgatgttggaacgtcattatgaccgtgcggctccaaacggaaccggtcatattaaagtgggtggtaactatgctgcaggtatgcgttctggcgaagttgctcaccagaaaggttattcaactgctattttcttggattcaaaagaaaagaaatacattgacgaatgtggtccggcaaacttcttcggaattaaggataatacatatatcactccgtattctcatactattctgccgtctatcaccaataagagcttgatggtattggctgaagatatgggattgaaagtggaacgccgtcacattccggttgaagagttggaaacctttactgaagcaggagcttgcggtactgcagctgtgatcagtcctatcggacagattgatgatttggaaaacaataagagcattgttttcggaaatccggaagtaccgggcgaatggtgtactaaattgtacaaccgtctgcgtgcaatccaatatggagacgaacctgataaattcggttgggtgaaagtattggaattctaatgtattgatacatattgttggcaaagcgagagccgatcggtccttggggactcggtcggctctcgtgttttttgtgtatgtcgttcgttgcgatcccttttcgatgtccgttcacactccttcagacctctcaccgacctcttacttatgtcttacgtttctccgctcctcctccgaagttcctccgaagcttgtccgaacgggtggcggtaagcaacggcggagcttcggggaaggttgctggaaaggtaaatgggggatgggagtgtatttttacgtgaaacggatacatgatgtcgagaagaacttttgaaaatataaataaaaaaaatacaatgggcgtacaaagtggaggaatcggttatatatttgtgatgaactaaatgtttaatcctttaaaaacaagatgctatgatcagaaatattttattgctttttatgcttggcatattgatggtgccaactgatgtggtggcggttgctgagactacaaatatgcgatgtgtagtcgaagataccaacagaacggtggaaggtgttgtcgtggatgaagagggaatgccgttgcagggtgtgtctattctgataatgggtacatcagtaggtactatttcggatgagcagggacttttttcgctaaaagcggacaagtccgggacattgtgtttttcttatatagggcgtaaaatgcaacagatagcgtatgaacccggagctaaaaatttaaaagtcgtaatgccgatagaaaatcaagagttggaaagaattgtggttgttggctatacccctgatgtcgagaatgaagaagaaaaagacaagtcatgtgggatagattccgaagaggagatatttgtcgttgtggaagagatgcctgaatttccggaaggaagtcttttggagtatttggctcggcggataaaatatccggtaaagtcgcttgaaaacagggaagagggagtcgtatatgtctcttttgtggtagattgttcaggaaaagttgtcaatgcaagaattgccaaaggagccagtgcactgttggataaagaagctttgcgtattgtaaatgaaatgccggtctggaagcccggtaagcagagaggcaaagccgtaaaggtgcagtatatattgcctattgagtttaaattacagcctcagtgtgataaatagtttgtgtaatctttgtatgtgttgtcactaagtaaggctaatggtatagaaattttgtgtcagggttaatgctcggcattgtattgacgtgtcaaaaatatatgagcttttgtttccgaatgaatcaggattttgtatctttgtgatggatattagtttatatgagtaattggagtgaacaacaagaagctaagaaagaaggcaaggagaaagacaagataaggcgtgaaacgcttggaaagttctttttcgatttgtcaaagcttgtatttacggctatggctttagtcggaggtgtttcgttgataattgacgagcctcacattaaacaaggagcattacttgtaataggaatgctattaacatatatattagcttctatcggctacaaaattttaaaaagataagattatggattttatgattatgtttttctctatatgttcggtgataggcataggaattttgatttggtttaaaaccaaaagtggtaaaaagtggttggctaatttatgatatggagtattggaagtaataattttatgcggctaatcttgtttgtataaattcgtttttattcttcaattactttcctgagcctaatgagtggtcattaggcactttcctgtttcttaaatattgcatgtcatgatgatggaaactaattgcatcgcaagtatttttgtgcaaaaatattctatccatattgtttggcacactgaatgtttttttagttttctttatagctataatggtattcggttcactataaaaccttttcatgatttgcttgtttgtgactgtgttcgttgcgatatacgttttttttctatatatcggatttttgtagttccaattatttgtaggctttattgatttgtcaatttgctgatattcaggtttatgcggcagaatgatacttctttctgatagaaatttattgtttttaacacaaaagtatgaatctatgtttgcatttatttattatatggttacatttgtatatctaaaatgattatgagtttttttgagaatagcaaactaagaatctaaatatgtgttatttatgaaaaaaatggttttatggcaaaaacgatggtggatggtgaatcttgtatcgattttggtaatgttgttttgtcctaatttaagtattgaagctaaggatgttggaggaaatggagtatcttttcttgatgctattgctcccataaaaggaaaaattgtgtatgggaaagttttggatgctgacggtaatcctttgcctggagtgacaatttctgtgcagggaacaaatttgggtgtgatttctggaattgatggaaaatttaaaataaccttaccggaagggaaaaatcatgtgttagtcttttcttttataggtatgaaatcacaggaggttcttataaaggatgacactaatttgacgattgttatggaggaggatgcaacagatttggatgaggtggttgtaaccggtatttatacgagaaaaaaagaaagttttacggggtcttcaactacttataaaggagaagatttaaagatggtggggaatcagaatattattcagagtttgaggacattggatccagcttttaatgttttacagagtagggattttggaagtgatccaaatcgtttgccggatatagaaattcggggaaaaagtagtattgttggtttaaaggaagaatttggtcaggatccgaatcagccgttgtttattttagatggttttgaaacgaccttacagacaattgttgacttaaatatggatagagtggcttctgtaacaattttgaaagatgctgcttctactgctatttatggttctaaggctgcaaatggagttgtggtagttgaaacgaaagctccagcttatggtaagttgcgtttgagttataacggaagtgtggatatttcttttgctgatttgactgattataatttgatgaatgcagaggaaaaattggaattcgaacgtttgtcgggggtttttgaaagtaatagtgcaattgagtatgagcaattgcagggacgttataatgcattgttggaaaatgtaagacgtggggttgattcgtattggatgtcagaaccattgcggttgggggttactcatcgtcataatatttacatagagggaggtgatgggcagatgcgttatggctttggtgtaaactattctggtattcagggagtaatggaaacttcatctcgtactattatgggactttcattggatctgatttataggaaaaagtggtttaactttatgaataaattgtctgttgattggaatgatagtgataatcctattgttccgttttcagaatatgctggtgcaaatccttattatgagaaaaaatctgcaagaagtgagcgttggttagaagattggtctgtggaaaatattgcaggaatttcttttcgtcaatatcgggtacctaatcctttatatgatgataatcagaatagttataataaggctaatggttttggggttcgtaacaattttagtattgaaataagacctttgaaggttttgaatattcgaggtcgggtaggattgacaaaatcattttcagagtcggaagtttttacttcacccaatgatactcagtttgcttcgacaacacctttgttgaaaggaacatattccaattctttgggaaattcgttgaattatgatgctgattttactataacctatgggcagttattaaacgagaagcatatgataaatatagcagctggagttagatttagtgaaaatagttctgtaaataagagttatatggcgcaaggatttcctgaagggaatttcaccaaacctagttttgctaataagtttccagatggaagtaagcctggttatggagaaagtaaatcaaggaatgccaatttttatatgaatggtggatattcttatgataatcgttatatgttggacgtgaatttgagaagtgatgggacttctgtatttggagctaataaacgattttctacgacttgggctgtaggtttggcgtggaatttacatagggaaaaatttattgcagataatacatcattatttgatatgttgaaaatcagagggtctgttggaaatcctggaaatcagaattttggctcgttttctgcaattacgacttatcagtttaataattggttgttgaatgattttggtactggtctgttagtatcttcttttggcgatccgaatttagagtggcaaagaactttagataaaaatatagggcttgatatcagtatgttttccaatcgattccatataaacattgattactatcacaaacgtactgatccgttgattgctaatataaatatgcctgtttcgatgggggtgacttctcgtcgggcaaatgttggcgtacaggtggatcaaggtgtaaatggaacaattcgatatgcttttttggatagaccccaagaaagaattagttacacaatgagcgttaattttagatatggtgcagcttattacgatgaaattggtcgtaatttggatcagtataataaagataatcttgctaaaaacatggtgcgttattatgatggaggaagtcctagtgctttgtgggctgtgcgttctagaggtattgatcctgcaacaggtaaggaaatttttgtacggaaggatggaactttgacttatgattttgattatgatgatgaggttgaagtgggggatacacgtccgacattagaaggtgtgtggggaaatacgctatattggaaaggttttactgcagctttgcatattcgttatagttttggagctgatgcttttaatagtacattgtttaacaaagtggaaaatatatcttctgctaccttggcggtaaatcaggataagcgtgctttgtatgatcgttggaaaaaaccgggagataaggcaaagtttaagagtatttctttgacagaaacaactccgatgtcttcacgttttgtaatgaaagagaattttatagagattgaatctgttaatattgggtatcaatttgatgcaagaaaattaaaaagaacattgggaatatcttcattgagtttaaatgcatatatgaattctattgctagattttctactttggaggatgaacgaggtatttattatccgtttgcccgcagtatttcattttctttgagtgttatattgtaaaaacttaatttagaatagattatgagaagaatgatttatattttatctgcagtgttttttttaaatggatgtaattcttggttggatgtgcagccttatgatcgtgtagcagaagatgtagctttcggttcggtgacaggctttgaaaatgctttgaatggtatttatattgaattgaatcgggatgttttgtatggacgatatctttctactgaaatgattgagttgatggctcaacgttataatgccaataaggcaactacatattattttgatgtgatggattatgcttatacagagtctaattgtgaaagtagattttcgagtgtgtggtcgaaattttataatttgatagctaatgtgaatttgttgttgaagaattgcgatgcccatagggatattctttccgatgagtattatagtttgataaaaggtgaagcatatgcattaagggggatgatgcattttgatttgttccgtttgtttggacctttgtataatacagaagatcagacaaaattaccttattataaagagtttgatttgaataaacgcccctattgtttacctgaacatttcatggacaatgtgataacggatttggatacagcgttggttttcttgcaaaatgatccggtattgacagaaggaggacggaatgttaattcctatgcatttacgtctcatcgaaatttgagattaaattattatgcggtgcaattattgaaagcaagagcagaactttatagaaacaataaatcggcagcattggaagctgcgatgaaagtgattaatgcgcaggaagaatggttcccatgggtgaaaagggaggctatttcatcaggtaaagaggatgctgatagagtattttatactgaaattatttttggtttgcagaatccgtctttatcaaaggtgtttactgctctatttgatgccactaatttaggggcagatattttattggcacctttgtcacaacaagtaagtaaaatatttgataataatcaggatgattatcgttatgaagcttatttgagaaatattaaaatggtaggtggaacaaattatagtgtgtttgaaaaatatagaacaactcaggatactttggctggtacgatattgccgatgttgcgagtatcggaagctttttatatagcagcagaatgtgagcctgtcccggcagatgggttggtttggttgaataaggtgttgaggcatcggggggtggctgaagttgagaatgagcaattattaactaggactttggaaaaggaatatttacgtgaattttggggggagggtcagcttttttatttttataaacggttgcagtatcctgaaattcgggtggcggatgatcctgcttatagtaggacaattgaaatgttggcaaattataaagtgccgataccagaagatgaaactaagtataactaaatgtaaatggatggtttatgaaaaaaatattgttgtttgttttgttggtagttgttgcttggcagggatgtcaatataccgagcttgatgaatatgaaggaggaagttctatatatttttccattacaagggatacaatgaaatattcttggggaaaaatagatagtgatattgatgagcaggtacttcaattgcctatttatctgtttggtgaagttgctaattatgatcgtacaattcgattgcgtacagagctttgtgatacggactctttgcgggctgaagttgatgaagattttaaagcgattccatctgaacttatccttaaagctgatactaacgtggcggtgttggatgttgtattaatgaggacggaagaattggcaaaacataatcgtatgtttacgattgttattgaggaggactcttggtttgattctgaatataattggcggaaggatagtgatggtaatccttattttattggacattcaatgactgttattatgactgaggatttccccaaaccatggtggtggaaagatgatgatccaaattttggattctggagttataaaaaagcggacctgatttgttctttgtgtgatatttctcgtactgaatttgttggtaatgaggtaatccctgattataaattgagatattatggaaagaaagttcaacgttatctgaatgaaaatccggtttacgaagatgatggaactttgatgacaatggggaaaaatgcacaaggatgatgtttgtttaaattttagagaatatgaaattgcttagatattattatatgtcagtgttctgtattttgctgattgcttgttttgaagataaaggtaattatgattatacagaattgaatgttcctgttattgaagggatacatacgcaggagtggtatgaaaaatttgctaatgtggatacattgcgtataaatcctaaaataacatgtcgattggaagaatcggagagtaattgggaatatgaatggttattaatgccgattcatgctggttataataaggattctgttgtgatatcagagcaaagggaaggttatgtgattggaagagaaaaaaatctagtttatccggtaaaaggtaaagccggacaatatgccggttttttcttggtgaaaaataagataacaggcgtgacttataaaactgatttttatttgaaattgcgtacggcgattggagatggatggatgattttatgtgaagaggatggaaaggcacggttagacatgatttcatatcgagcggaagatactaattttatttcacgagatatctggcatgggtcagatttcccgttaggaaaaccctatcgtttgttttataattttaatcaaactaaaagtgatagattggtttggagcgaaaatggaacatggggtttggagggggaaactttatggccttctcaagaaacggatttagcattgcaatttgtagaatcaccgggaaaagttgaagttgcaggaagttgtgtgtgtatgaatacgactcctgaacgggagattttagtgacttctgcaggagaattatatatgaggaattattatgatattgctataggggcattttttgattatccaagaaataagatagaaggacaggaagtttactatagattgtcagatcaaataggttttagaccttattgggcttggcctactacgacagcggttttgttttatgatatggataaccgtcgtttcttgtctttggaaaatgatgatgaatttttgtctgaggtatctttttcttctaccggtaatgttagcttttcagctaaaacaggcaaggatatggtgcatatggaaggcaatatggaaggatatgtgtttgctgtattagtagagcccggtacaagtgaatattattgttatgggatgtctttacaacctgattgtaaggtgttttgtacacatcaggtgaaattattacctgcaaatactgatcgtattactcattttgcattccatcctctttatcgattgttatattatgcgacggaacaaggagatgtgtatgcatttaatatgaatactcccaatgtaaaggctgaaaagatactttcttttcctggagaaaaaatcgctgttatgaaatttaattatccggcaccttttgtgagatatgaaggatgggaaaaagcaagatggaattggatttacatagcgaccaatcgggatgagctgtcggaacatgaatgtggtgtcgttcgcatgtatgatgtgtcagaaattactttaaagccgaagaagaaatttgaatttgataagtttggtaaaattgtggatatgaaatatcggtttcgtggagatgaagcgataacgcagtaaagcattggataaaaataattttttacatttatgaagagaatattttttgctattttggtgatggcatgttttattaaaagtcatgagagtttaggacaaattacaggaatttattctaaaaacggtacagatttgacccttattcgggtgaatggagataataattatgatacattggaaacggtacaagtaaaagatggtcgtttcttattttcttatgtcccaaccgaaacaggaatatattatttgcattttggtgaattgaagtggtctttgcctttattgttagaaaatactaaaaccgaaatagcaatacctaatttaaaggctatacaaataagtggaggctatttgcaggatgaattaagtgaatggaagaaacagcaaaaaaagttgactgaaaaatggcttgaattggataatcagattcaaataacttcaaatgaggttgctaaagagaaattgaaaggaaaaagaaaaaaacttatagcagaaatcgatgaactggagaatcgttatattatggctaatagcgataatttgctaagtgtatttctaatttggcaaaaaggaaatataaattttttagatttggattataaatataatctgctatctgacagtatgaaagaaagtactttcggacgagaatttaaaaaaaatatagaaaaaaaatggcatatgacaccaggtgttgtagtccctgattttgcaatacaagataccagtggagttgtgagacatttgtctgattttggcggtaaggttaagttacttgatttttgggcatcttggtgtgtaccttgccgtgctgctaataaaagatttgtggaattatataaaaaatataattcacaaggtttggaaattattagtatttcagttgatacgaaagctgaacaatggaaaaaagctatagtaaaagatggaatggaatggacgcaattgtctcagttggaattgaaagcttcttcgctttattatcaatataagttgaatggggttcctacttggatattattggataaaaataataaatgtatagctcttggtcacagtgatgaaaaattagaaacgttgatacagaatgaattaaaaggtagatagaaaaatgataaaaatattatgttttttattacttggagtgtcaagtattgttggatgtagtcctaaagggtataagataaatggtcgtattgaggatactgatagggcgaccattaagcttttagttacaaatgaagatggaaaactggaaacattacagtcggtagtaacggatgacggatcttttgaatttagtggtgtgatgcaagaatcgcatttgtgttttttgacagtatccaataaatttggaagaattcctttgatgcttgaaaatgcagactataaaattacgataggggaggcgaatgaaaatagagcagataattatgttgttgaaagtacaagtcaattgcaaaatatccgtagtgaatttcaaaagcagcaaaaggtattttttcaaaaaagcgattctttagttaccttgtatgatggagctaagaagattgtagatttgatagaagcttctataatttatcgtcaattagatactttgagtatgaagtacaatgaattgactttagaatgtattaagagtaatgcagataatcttgtcggtttgtcattgatatatgatcctttgatgcagttgaaatatccagttttaaaaagtaggtatgaattattgtgtgataatatgaagaacactgttgaggggaaagcatgtttgcagcgtttgaaatatttatgcggtttggtcgttggtggaacattccgagattttaaaatgccgacagtacaaggagatacattccaactgtctcaattaaatgctaaggttaaattgattgatttttgggcttcttggtgtggaccatgtcgaaaagagaatcctaatcttttgagaatatatcaaaaatacaaggataaaggattggaaataataggaatttctttggatactgatcgtgaagcatggttaaaagctgtgagtgatgataaattgccttggactcaaatatctgatctcaaaggaatatatggtgatattgcaaaaaaatatagtattcgtgctattcctcaaatgtttattttggatgaacataataagatagtagcgttgaatttgaggggagaaagaatagaggctgctattagagatgtgcttgaataagcaaaattctgtcgtgtttaaatgggtaatgtgaaatcgatatttaataagagtgcggttgttttgatatgaaccgcactcttttgtgttttatttggtattgataattacttctgcatgtgggtaatagccgacctctttttcaatctggctaagtggacggatttgtagaattgaagccggatcgatgtcaaaggtctctgaaaggcgtccgttgatgacgagcagcggattttccattttatttaaattgtatttgtagtcttggttgttgtaacggaaacttagcacaccttctttgaaactggtaaatgttcccaattgtttttgtgatgtgacaaaaagataagatttcttgatgtctttttttgatgggacaaggttgacattcatgattttatcgggcatttggacgttgtctttgggtgcttgttctccatcgataatgtaagttatatccgaatttttggaatctactttcagattggttttgccgttttcttctgttatttggatggagttgctggtgacattactatcttgtcccaacgattgaaaatattgttcgatggttttcatgtttccgggttgtagcatactggaaatatcaaaagaaccggtgctgtcaatggctgacgggaatgcgtttttgagccgttgctccatgccggagaagaaatctgcatccaagccgctgaaaaagccattcatcaatccttctaaagattgcatcatatttcccatatcctgattatctcttgtctgtgcttgggttgaaggtgacagtgtggcaagcaagccgaggccgtttatattcaatgcccgtgaaagaagggcgatgcggtcagtctgaatgtctccgcgcaactcaatgatgtctgcctcaaagggagatacgctccatacgaccaaatctgtcactttgtctgcttggctacgggcatataccaactgttcgctctctccatcgtagttgcttttaataagtcggtattcgtttctttcttccaataggttgtggaattgctggagtatcttttcgcattcttccggtttgcagatgcttggattgatggttaatatgttcacttcatccagtttttgaagcatttctttcatttcgggtgaaaggttattgttttggtaaagtccataaaggcttttgtccaattgtgtgacactgacacctgtttttttatggtatttggccatttgtttgcccagttgggcgtatgtgccgaaaggtatcagaatcattgtcagtaaaatgaatgtcaattttttcatggtatcaaattttaaatggtttttcagttgtcgtatataagacgaatgtatgtttttttcttataggaaaatcgattttaactaaattttataccgttgtggaaagctgttgtttttcatggggaatatttcctcagaagtgttctaaaagttcttggaatgcatgtgaaatgtaggatgaaattatttgtttatgcattgatagttagtatatttggataataagttttttgatgtacctttgcgcattaattttttggcatgtaattttcattactggatatgatggaaaatataaataacaatagaggaatgatacttagaaaaaatgtaatttggtccctgttgggtctgttgattgcctttacgggatgtaaacgcgaaaaagtgcaggaacgtattccggtggttgtagagcaagccggagtgaaagatgttgaaatttttggggaatatgtgggacgggttcgtgcaagacagtttgttgaggtgcgagcacgtgttgaaggatatttggagaagatgctgtttgaagaaggtaagaaagtggagcgcaaccagcctttgtttattatcaatcaagacatttatagagcccgtgtggataaggcggcagctcagttgaaaaaggatgaggctcaggaattgaaaaccggacgtgatgttgagcgtctgcgtccgttgtatgagcagaatgctgccagccagttggatttggataatgcggtggctgcttatgaaagtgcaaaggcaaatgtggctatgagccgggcagacttggctcaggcggagttggaattgagttatacaacagtacgttctcctattacaggatatatcagtgagcgttatgctgatatcggtgcattggtaggtgccggaacaaaggctttgttggcgacggtggttgcaagtgatacggtattggtggatttcagtttgactgctttggattatttgcgtagccagcagcgtaatgtgcgtttgggcgagcaggatacgtctcgttcatggcaaccctctattattgtgactcttgcagataattctgtttatccggaacggggtattgtagattttgccgatccgcaggttgatccgaaaaccggtactttcggagtgcgtgccagtattgctaatccggacagaaagttgttgcccggacagtttactaaagtgaaattgttgctggatatgcgtgaagatgctgtagtagtaccggtgaaagctgtggaaattgaaaaagggggtgcccacgtatatgtgatgcgtcgggacagtacagcagagaaacgtctgattgagaccggaccggaattcggtaattatgtggtggtggaaagaggtttgggaccgaacgaactggttgtgacagaaggttatcataagctgactcctggagtattgcttgtgccggagaccgacgaacgttggaaaaaggacaaggaagaaagtgcagagaataaagattagtgaatagaatgagaggtatcgtatgaaagtgactttttttatagaccgtcctattttctcggcggtattgtctatattgattgtggtgattggttgtatcgggctttatttgctgccaattgaccagtatccgcagataacaccgccgatggtgaaaatatcggcttcttatccgggggcaagtgcccagaccgtatctcaggctgttgctactcctattgaacaggaattaaacggaactcccggtatgctttatatggaatccagcagttcgaattccggggggttgtccattagtgtgacttttgatatcgcaactaatcccgagttggctgctgttgaaatccagaaccgtgtgaagctggcagagtctcgtttgccggcagaggtggtgcagaatggtatttcggtggagaaacagtcttccaatcagttgatgacgttgacgttgacatctgaagatccgcgttttgacgagatatatttgagtaactttgctacaatcaacgtggcggatattttgaaacgtattccgggtgttggacgtgtttctaatatcggtagtcgctattatggtatgattttgtgggtaatgcccgaccgtatggcgaattttggtttgacagtgaaggatttgcaggatgctctgaaagaccagaatcgcgagtctgctgccggagagttaggtaagcagccgatgagcgggcaggatataacgattcctattattgcgcaaggacgtttgtctacggtggaagagtttgagaatatcgttgtccgtgccaacccggatgggtctattattcgggtgagagatgtggcccgtgtatctttggaggcttcgtcttattcaacggagagtggaatgaacggtgccaatgcggctgtgttgggtatttacactgtccctggagccaatgccgtcgaggttgcagaaaatgtccgcaaggcaatggaggagattagtaaaaatttcccggaaggattggagtggggtatcccgtttgatattacatcctatatttcacaatctattcacgaggtgtacaagaccttgttcgaagccttgatattggtgattctggtggtgttcctttctttgcagaattggagggcttccttggttccgttggttgcagtgccgatttctttggttggaaccttcggcgtaatgcttgcaatgggattttcattaaacttattgaccctgttgggattgattctttctatcggtattgtggtggacgatgcgattgtggtggtggaagccgttgagaattatatggaaaaagagggtttgactccttatcaggctacgaagaaagccatggaaggcttgaccggagcgttgattgcaacatctttggtgctggcagccgtctttgttcctgtaagtttcttgggtggaattaccggtttgctttatcgtcagtttgccgttacgattgtggtttccgtattgatttcagcagtagttgccttgacgttaagcccggcgatgtgtgccattatcttgcgtccgtctcatggaaataagaatctggttttccgtaaaatcaatacatggttggcttccggaaacaataaatatgtcaatacattgactaaggctatcaaatatccccgcagtgttctggcaggattcggtattgtgcttgtatttatatttgtcttgaaccggcttattccgagtagctttattcccgaagaagatcaaggatattttaaagtggaattggaacttccggaaggagcgaccttggagcgcacacgtgtcatcacggaccgtgccgttgagtttctgaagaatttgccggcagtagagtatgtacagaatgtgaccggttccagtcctcgtgtaggtacgagtcaggcgcgttctgaattgaccgtaattcttcggccgtgggaagaacgtaaaggcaataacatgggggttgatgaagtgattgaggaagcgcgtaaagagttggagaagtatccggaatcgaaagtctatttttcgaaaccgccggtaatccccggattaggaacctccggtggatttgagttgcaggtggaggctcgtggtggtgcttcttttgaaaatctggtgtctgcaattgatactttgatggcttatgcttcgaaaagtgaggcatttaccggactttcatcttctttgcaggcagagattccgcagttgtattttgatgttgaccgggataaagccaaattccttggcattccgatggcagatatcttttctaccatgaaagcttataccggctctgtttatgtgaatgactttaatatgttcaaccgtgtgtataaagtttatatacaggctgaagcggactatcgtgcacgtcgcgacaatattggaatgttcttcgttcgtacatccggtggcgacatggtgccgttgacagctttaggagaagcggaatatacgacaggaccgggaagtatccgtcgtttcaatatgtttaccactgcgattatccgtggtaatgcagctccgggatacagttccggtgaagtgatggatgaattggagaagattgcccgcgaacatttgccggaaactataggtttggagtggagtggtctttcttaccaggagaagcaggcagagggtcagatgggattggtgttgtcgttagtgttcctttttgtgttcctgttcttggctgcgttgtatgaaagttggttggtgccgatatcagtgttgctctctttgccggttgccggtcttggagcctatttgggtattgctgccttgggcttgaacaatgatatttatttccaaatcggtttggtgacattggtcggattggctgctaagaatgcgattttgattgttgagttcgctaaaatggaggtggataaaggagtcgatgtcattacagctgccaagactgctgcttcgcttcgtttccgtcctatattgatgacgtcattggctttcgtgttaggtatgttgcctttggtaatggcatcgggtccgggatctgccagccgtcattcgataggaaccggtgtgttcttcggtatgattgtagcgataacagtgggtattgtgcttgttcctttcttctttgtgatgatttacaaattaagagacaagattgccggtataaaaaagtaggtgtttatttaatttacaatttaattctatgaagagaatatatatatggggactggtcatgatggcattggcggtatcttcttgtaaattgggcaagaaatacactaggccggaactggatttacccgaaaatattgatggagtgcagggggataccacttcggtcagcgggattcattggtcagaactttaccaggatactgttttgcagaatttgattcgtcagacattggaatacaataaaaatttgcaagcggctgcggcgagagtgaaagagatgatggagggaaaacggatcagtaatgcagatttgtatcctaagatagatgctcaagttgtgggcgaatataaagatgctgcttctacgagcgaaacatacgggggtaaaggactattgtcttgggagttggatatttggggaaagttgcgttggggaaatcaggctgctttagctgattatcttggtagtgtagcgggccagcgtgctttgcgcatcactttgattgcacaggtggcgcaagcctattttgaattgacggctttggatcaggagtatgctattgtaaaacagacgctggcagctcgtcaggagggtgttcgcttggcaaggcttcgttttgaaggaggtttgacatcagaaacttcattgcgtcaggcacaggtggagcttgcccgtacacaaacattgattcctgatttggaaaaaaatattcggatgaaggaaaatcagattgcccttttggccggacagtatccgggaccgactcagcgtggtcaagggttggaacagcagacattgcctgcaactcttccggttggtttgccttctcagttgttggaacgtcgtccggatattgttcaggctgaatataaattgcgtgctgcacatgccaaagtaggaatcgcttttacgagtttgtttcccaagattacattgaccggtaaggccggattggaaagcagttcgttgtcggatttcttgaagtctccttactatttctttggaggagagctgttggaaccgatatttaatatgggtaaaaaccgtgcaaaattgcgtgcggcaaaagcagcgagagagcaagaggtatatgcttaccaacagacggttttgactgctttttctgaagtcagcaatgctttgattgcatcatcgaaaagtcgtgaaatccgggaatcccgtaaaaagctggaacaggcttcccgttcggctctcgatctcgcaaccctgcagtatattaacggtattaccaattatctggatgtgctggatgcgcagcgtagttattttgatgcccagataggtttgaataatgctattcgtgatgaacttttgactaccgtacagctctataaggtgttgggcggtggagatgaataaactaaagatatttttttattgaaccctaaaagtcggacgagagattgatagtgtggctgaagagtatgatgcccaacagcagaagagagaattatcgataaggatgtaatcaataatttatagataatcgtaagtatactaaatattttgtacttttgtattcggatagaggcaactctttccaagacatattagaattaaaaagaagcgttatgcttatcttgtagttttgagaacgtagaaaattttcaaaaagaatgtacaaggatagcatagtggttctcacgctatagcgtgggctgctattactatatctgtacattcgggtttcctacgaccttcaaaattaagatgtgacattgcagtaccacgcttctgtgtctaataactaaaagctaagaaggtactggtaggcataatagaaaattataaaaaaacaactgtttttattgatgctttctgcagtgtttattcttgccggatgcgacaaggaaaatgacgatgctgatgttttcactccacctacacaggaacaacttacccaaaacgcttatgctgacaatgaaaacacgggaggcggtttctcttttacaacagatgctccatggactgcgactgtagaagaagtgttatcccagaaccagtcatccatgcaggtaaaatcagcaacacgctcttccgggaataatgtagtttggctgaaactctataacggcaacagcgaagcatatagtggtgaggctggaactattacactccgcatagaaattgaccagaactatacgggtgaacggcgtgaggctacgattacaattcgctctggcaataatacatttattgtgacagttatccaggaaggaaccaaacaggatggtagcgaaaatgagccccctgttaaggtgactaagattactcttgacaagacagaactttcacttgagactggaaccaaggcaactcttactgcaaccgtagagcctactgatgccacaattaaatcggtggtatggtcaagcagtaatttagaggttgcaacggtaaatccggtaaccggagaaattgttgcaatagctgacgggaatgctgtcattacggcaacctcttcttccaataaggaggtatcagcatcatgtgcagtaactgttggaaatagcgtacctgttgtttcaaaggcttttgtcaataagattgagcgcacagtaacatattgggacaagttccctgctacggagtatctagaagatgaagtaacctattcgttcgaatatgacgaccgcaaccgcatatcttcgtatataattgactttaagcccactaacgagcaggaaaaggaaaaacaacttatcagcaaaatcgactattcagcatctgaccgcctccgcatagaagaccaatggtctgataagaaccaaaaggaaatctacgatattttactcaataaaaaaggatttatcacaaaaggtgagtcatggcctactttgtatgaacctctcgaaacatatcaaattgagtataacagtgaagatcgtgtttcgcgagtgtcttattccaaatattggagtacgtttgtttataaagacggggtactttccggtggtaaagactttgatggaacagatgtgtatgagacgtctggatttgaacaaaactttggtcaggtagctaatgataagttgaatatagatgtcaatatgttgtttatgcctggtttcttttcagaagaaccggaacggggagacgtgccgagtcgccttggtcgtttagctttgcttcggttagccggacgtggtatggaccgttatataaccttagacggattatcctggagtcaagatgagaccgacatgaattttccagaaggctggtcagaacctaatgtaacagtccataaaagctatgaatttttttcttatgactgggatgaagagttagggctggattatacttttaacaatgatggtacggttgctgcaatttcagccagtgcaaccatgcagaaaattaagaaagagtttgatattgtagtggggagcgaactaatacgtcctggatatccggaagccggatataaatatgaaatcaaaaaccggaaagagacagtagtggataagggaataaatacaattacctataaattcagttatcgttaattttatattttccattctcttctatgcagaattgtatactagagaatggaaaatctgtgatacgtcaagactttgcggaattctgtaagaggataggtgttcggctttcagcagtctcttgtttttattcagattcctcttgttgttgcatatgctgacaatgattttatcaacacgtaatggttgcatgaattgcaaacgttgttgccgtttgccagtcttgcttggatatggcaaacggcattttctattaaatatttcttttctctatttctcttaggttttccattttctttttacgaaggaaaccgttgatgtcttccaagtgttctgtcacttttttatttccgaattcatatacttttgttaccagtccgttgaggaaatctcggtcgtgagatacgacaatcactgtaccgtcaaaatctattaaggcatttttcaaaatgtctttggtctttaaatccaaatgattggtcggctcgtcgagaatcagcaggttgaccggctgaagtaatagttttatcatggcaagtcgtgttctttcaccgcctgataatacttttacctttttgtcaatatcatctccgctgaacatgaaggctccgagcaggtttttggtattgtttttcagttccaaaggagttacgtcatcgacagtttggaaaacggtcaggtcttcatccatcagcgaggctgcattttgtgcaaagtatccgatttggacattgtgtcctaaagtcagcttaccggtatagtctgtgatttctcccataagacattttaccagagttgacttaccttcaccgtttcttccgacaaaagctactttttcgccacgttggatggtgaagccggcatgattgaacacttcatagtctccatagtgttttgataaatcgtctacgataacggggtagctgccggaacggggtgccggtggaaatttcagtcgcaatgcggaggtgtcttcttcatctacttccaggatttccagtttttccaacatttttacgcgggactgtacctgtagagtttttgagtaagtccccttgaaacgttcgatgaattccttggtctcagcaatcattttctgttgctcgtcataagctttttgttgctgggctcggcgttccttgcgtagttccagatattttgaatagttgaccttgtagtcgtaaatacgtcccatggtcacttcaatggtacgggttgttatattgtcaataaatgtcttgtcgtgagagatgacaacaacggctttcccgttgtttatcaaaaactcttccagccattggattgagtctatatccaggtgattggtaggctcgtcaagaagcaggacatccggatttttcagcagcattttggccaattcgatacgcatgcgccatccgccgctgaaatcgctggtctgacgttgcaagtcttcgcgcttgaaccctaaacctaaaagggttttctctacatctgcttcaaagtgggtgaggtcaatgctatagaacttctcgcttagggaggagacctcttcaatcaacttataatattcaggagactcataatccgtgcgttctgtcaattgacggttgagtccgtcaatacgcttttccatagcaaacagatgtgcaaaagcctgagatgcctcttcgtacaccgttcttccgtcttcagtcattaaatgttgcgggaggtaggcgataacagtatctttaggggcagaaacatttccgcgtgtcggtttgcgttctccggccagaatcttcagtagggttgatttccctgctccgtttttacccataagggctattctatccttttcattgatttggaaagagatgtccttaaacaaggctctgtcaccaaattctacagtcaatgcatcaactgaaatcataaatagctgtaattgtattcttgtttatattgcataaaaaaagagtcaggataaacctgactcttcgccttttgtactcagggcgggaatcgaacccgcacgtctgttgaggacactggattttgagtccagcgcgtctaccaattccgccacctgagcaatgaactcgggtgcaaaagtatatatttttgaataaactccaaaggatttggcgattttttttatcagttgggaaattgcatagaataatttagtaactttgtgcatattgactataatacacaatggatatgaaacttgcagaagctctcagcttgcgtgctgatttacaaaaacggataattcaattgaaacttcggttgaaaaacagtgcaaaagtgcaggaaggtgatgaacctgccgagaatgttgaggagttgtttaaggaattgaatgagaatctcacccaactggaagagttaatttatcggattaatgatacgaatatgcacactttgtgtgatggggaaaatctgacacgtttgatggcacgtaaggatacactttctatgcgagtggatttgttgcgggaactgctgaaacatgttgcagaaaatgagacccgctatgggagaagtgagctgaagagtatccggattgtaaatgtgtcagaacttcaaaaagagacggataattatgcccggcaattgagagaactggatgttaagattcaagggttgaattggacgactgatttacgttagattgttttgaggtagtttttcagaagtatagtggcggcatgattctgcttcttcgaaaggagagcaaatttattgtgtgctttgggaggaaaagctgtatcagcaaactgcaaactcagcacagtgcacaaacgcatatcgcatagtgaactaagagttcagaattattgagcattaccacatgtcgactatatggaaaaggaaaaatgagggtgggtttggggaaatagaaaataaaaaacctcttaatcattaagattaagaggttttttgtactcagggcgggaatcgaacccgcacgtctgttgaggacactggattttgagtccagcgcgtctaccaattccgccacctaagcaatgaactcgggtgcaaaagtatagttttttgataaaataccaaagagaaatgataattttttttgtaatttgtgctaactgtatggttttatgtatatttgcataatgagaattagtatggaatgaggtggaatatttatatacggagaatatgattaagaatgtagtatttgatttaggaggagtggttgttgattggagtccggaacgtttgctggcaacttatcccggcgataaggaattaccggtcgctttgtttaaaaagggctttttccagcaatattggtcggaatttgacagaggcacaattacacaagctgaaatggtgattgctatgagtgattttgctggacgtatgtatgcggagtgttgggattttgtggaatttatcaagcatactttggataatctgccggcaacttgtgagttgatagaagaattgtctgaaagaggtttccgtttgttttgtttgtcgaatatgtcggtggaatattatgattatctgaaagaccgaaaggtgttctctttttttgagggacgcattatctctgcattggaacataccattaaaccggaaaaggaaatctatcagattctttttgaccggtaccatttggttccggaagaaacattgtttgtggatgatctgattgcaaacattgaagccgcccatgcattgggtatacagactgttcattttacagaccgcattgcggcagttgaaaaaatcagggagctaacgaaatagtctcccgttttttaatttccaatagtatctgccgcagagcatgattccggttaaggtgagacctaccggataaccgatccaaataccggtaatgccgagatttagtataaatccacagatgtagcacaccggcatagccagtaggaaatatccgataaaggaaatgatagccatggaaatgacatcgccgatgcctcggagcgagttggcataaatgatttgtagagcatcgccgaattgatatatcatcagaatgataatcagcgaagagaccagactaatgacttccggcgaggtggtaaatagaataccgatgacatcctgtgcaaagaaaaagatggtactggctattaaaaccagacaaagcatgatgtgaaatccggccatggtgcttcgttttacattggtgatatctcctcggccatagaagttgctgactcgtacagagacagctgctccaactccgtagtatatcataaagcctagggtggagattgcgatcataatttggtgtgcggctaaagcaatactgccaagccaaccaatcatgatgcctgagatactgaacaaggctgtttccaagcccatttgcaggcctaccatccatcccattttgttgagggataaaatatctttggtgttgtattgcccgcgacggtaacctacatagtatttgcggtaatgtatgctacggtagaagagtatggcaaaagcagcaaacatgacaatacgggatataagcgtggagattccggcaccgacaacgcccagcgctggaaatcctaatttgccgtatatcagaatatagttgccgatgatattcaaaacgttggctggaatcataatgtacataggggttcgggtatctgtgattccgtctgcaaattgtttgaacgagttaaaaagcatgacaaacggcagggatgccaattgtaacaaaaaataggggcggatgaggggaagaagttcttccggttgtcccatcttgtcaacattaaaccagacaaaggtcatgatgagagtaaggagtattcctattaatagatttaccaatagactattgcgtagtaactgtccgactctgaaacggtcgtgtcgaccgaaaaactgtccgaccaatggggtcagtccataagaaaaacccagtccgaaaaggatagggatattgaatgcactattgacaaaagatgcggctgcaagatggagcgtatcgaattgccccaccatcatattatcagctaagccgacaacgacaatcccgatttgtccgatgacaataggaactcctaatctgataagttcccgataatgttctttataagttgtgaaataattcattgttggtgcttctaaattttcggatgcaaaagtacaaattcctttctatattttacttttttttctaccttgcgctttgatacgaacaatacctcgataggttgaggtggtaaatgtaaatattggatatatgagaaagatttgttgtgttttggtgttgatgttgctttttacagcaacagtttttgcaggtgaaggtgttttggaaaggttgcgtatgattccgcaaatctccgatatcaaggagttgaagattgatgaatttaacgagtattatcaattctgttttgagcagccgatagaccatacaaacccgtcgaaaggaacttttaaacaacgggtgttattgggacacagggattataatgcaccggtgattgttgaattggaaggatattatctttatactcaagaagctggcgagttgacaaggctttttaagggaaatcagttgactattgaacatcgtttttttgatggcagcgtgcctgaaggaaatattccatgggattgtctgacaattaagcaggctgctgatgatcagcatgcaattattcaagcgataaaaaagcagatatatccttctgtcaagtgggtgtctacgggtataagcaaaggaggacagactacgattttccaccgttatttttatcctgcagatgtagatgtgagtgttccgtatgtggctccgttgaatttggaatatgtagatcctcgtcttgagaagtttctggatagattgggtaatggtaaaggtaattttaataccatgtttgcaggagaagacgtgaatgctgcacattggactgtgcgtgattttcagttgttgtgtttcaaaaatcaggataaattggctgggatgttggattcattggctcaggcaaggaattatacctatcaaactgttggcggagtgaaacgagcattgcagttgatgattttagagtatccgtttgctttttggcaatggggacataatccggcagatattccggaggaagaatcttctgaatggagtgaaatatttgattatttggtgcgtatttcttctccggatttctttgaggacaagtatatggagcgtatgcgtccgtttttttatgcagctttgactgaaacgggaatgtatgagtataatataaaaccattcaaaaagtatatgcctgatgagaaggataatattgatttctcttttgcaatgcctgccggggtagagcagaaagcattcaatgcagcccagatgaaggctattaataaatggttgcagactgatgcagaaaaaatactgtttgtatatggaggaagcgatccatggtatgcgaccggtgttgatttaaaaaacaattggaaatgtcgcaaatatgtacgcggagacatgagtcatacatgtcgtatcaaggattttgatccggtgtcaaaagaagatttaatcgatacattaaaagaatggctggaggagtaaccagccattctttttatttatgaataagttcgtctaaaataatacttgtagctcccaattggctttttacatacgcaagagctttttctccggcagtttgggtgattgtcggattgctgataagagagtccagcaattcttttaattctgtgccgttgttgatggaaaaacctccaccttctttgatgagggtaacggcttcattgaatttatgatatttgggaccgaatatcacaggaataccataaacggcagcttccaatgtgttatgtatgccgacaccgaagcctcctccaatataggaaatattgccatagcggtaaacggatgataatagtccgatgcagtcaataatcagtacgtcgtattcggatagatttgttggtgcctgtgtatatcgggctatttttttctggcatttttccatgatggctttgatatggctgtctccgatttcgtgtggagcaagtatccatttatactctcctgaatagtggttgatataatccatcaaaatatcctcatccggtggccaggtgcttccgcataccatagaggaatgcccattgcaaaacaaacgcactgtttcaatgtctttggctgcatctgcaatttgttttacccgatcgaagcgggtatctccggttagatgtgtacgtgtgataccgatattttttaaaagttcaaccgattgaccgtcttgtacaaagagccggtcaaaaaaggtcagcattttgcgatgaagtcctccccagttcttgaaaaacggttgttccggacggaaaatggctgaaatcagatataccgggatgtggttgcggtgaagctcattcagatagttgtaccaaaattcgtatttgacaaaaactgccgcatccggtcggaatgttttgataaatcgggcggcattgccgggagtatcaccgggaagatagtaaatatagtctgcaccagtgtagtttttgcggatttcatagcctgatggagaaaagaaagtcagtaaaattttagtgttcggctctttttctcgtaagcgttccatgacaggacgtccctgttcaaattcacctaaggatgctgcatgaaaccataccaagcggtcttttccgcgtttgaattccttgatttgttttcgggtttgtctgcgtccttttgacagcaaggatgctttttcgttgaatggggctgccaatttgatacccaatccgtatgcccgtataccgatgttatatagaaatgccatactaattagattaggttgcaaaagtactatattaattttcaaatatccaaataatactgtacctttgcgccgtcattgtggaaagatttggctgattgcaaccacagaaaaaaattgctaaaatgcataacttctgaaattcaaccatccattgcctttcccataatattaattcaccgttgaggtaattcaatttaaaattaagttatgggttatttatttacatcagaatctgtatctgaaggacatccagacaaagtggccgatcaaatatcggatgcagtattggacaaaatcatcgcttttgacccggaggcaaaagtggcttgcgaaacattggtgacaaccggacagacaattgtagcaggcgaaattaaaacaacaacgtatattgacgtacagcgagtggcgcgtgaggtgattaatgaaatcggttataccaaaagcgaatatatgttcgatggtaatagctgtggagtgctgtctgcgctacatgaacagtcgccggatatcaatcggggagtcgtgcgtgaagacccgatggagcagggtgccggagaccagggaatgatgttcggttacgcttgtaatgaaacagacaactatatgcctctttctttggaattggcacatttattattgcaagaattggcaaaaatccgtaaggagggccagttgatgcagtatttgcgtccggattcaaaatcacaggtgacagtagaatatggagacgataacaaaccgcatcgtattcatacgatagtggtgtctactcaacacgacgattttatcaaacccgccaatgaaacaccggaagctcaattgaaagctgatgaggcaatggtggaatggataaagaaagacatcatagatattctgttgccacgggtgaaagcccaattgcctcgccgtgtacagaatttgtttgataaagaactgattttacatgtcaatcctaccggtaagtttgtaatcggtggtcctcatggagataccggacttacaggacgtaaaattattgtagatacctatggtggtaaaggagcccatggtggtggtgcattttcaggaaaagatccatctaaggtagaccgttcagctgcttatgctgcgcgtcatattgctaaaaatatggtggcagccggggttgcagatgaaatgttgattcagatttcgtatgctatcggtattgccaaaccggttggtgtatatgttaatacctacggaacatcgaaggtgacattgacagatgcagaaatcgctgaaaaaattaccggtattttcgatcttcgtcctcgggcgattatagaacgtttgaaattatgtaatccgatttatcaggaaactgcaagctacggacacatgggacggaaacctgaaattgtcaagaaggtgtttacttctaattattgggaaactgtagagaaggaggtagaactgtttacttgggaaaagcttgattatgtagatgaagtgaaaactgcttttcatgaattcaagaagcagtaacggcttgcttgaaaacagataagaattttataaagccctgaaggtcaccactggattttttttttgagtaaatcttggaaaagtggcaaaaacacgtatttttatcttggaaaagtggcgtatcgctttgctgttttcattgataatagtatagataagaataaactatgataaagagaaaaatagatagctacatcaaacattattatgaaacttctcgcaatgctttgcttgttaccggtgcacggcaaattggcaagacatattccattcgccaattcggcaaaacattcaaaagttttgtcgaaattaatttcatagagagacccgaagctgtagaactattcaagggagcaaaaaatagtagtgatatcttgttccgtctttcgacgatctcttcggtgccgcttatcaaaggtgaaacactcgtcttttttgatgaagtacagcagtgtcctgatattgttacagctatcaagtttttggtggatgaaggttcgtatcgttacatcttgagcgggtcgttgctgggcgtagaattaaaagacttgcgctctgaaccggtcggctatatgggcgtaaaggatatgtttccgctagactttgaagagttcatttcgtgtataggactcaataacagcgttattgagtcattacgcaatgcctggttgcatcgcactgccatagatgagtttgtccacaataaaataatggaactattccggctttatctggttgtaggcggaatgcctgcagctgtaagcaagtatattgagagtaataatctgcaggaagtgatggctgtgcagcaagacatcattcgtctgtacaaacgcgacatagcccaatatgatccggagaacaaattatatattgaagagatttttaatcttattccacctgagttgaatgctaagaacaaacgcttcgttctcaaacgtttgaacgagcatgcaaagttcgatagggtagagaatagttttttgtggttgactaacgcaggtgttgcattacctgtctataatgtggaagaaccgaaaattccgctcctgcttgctaggtcacgtaatttgttcaaactttttcaaagcgacattggattgttagccagccaatatgccgagggtattcaaatgcggattataaaaggagacaaggatatcaatttcggttcaatctatgaaaatgctgtagcgcaggagttggtggcacacggcatcacttcctattattataacaacaaaaagcgtggagaattggattttgtcattgaacttaacggcaaggtgttgcctatagaggttaagtcgggtaaagattacgaaacccaccgcgctttgtcaaacatcatggattgtaacgaatacgatctgccggaagccatcgtatttaataacgacaatctgcgcaccgtgggcaatattgtttatgctcctatctatatggcgatgttcttggaaaagaataatatagccccgactttttataaagtagatatttcagggctataggggtgtctatctgtttttttttatttttctccatagtaagtgatttcccatagtaagccggctgctgattctttgggagacaactcaacgtcttcttcgatgcggacctccattcccatgacttcttgccagtccggatactctgccaatgtacagatatgttcatcatcttctctttggtgtacacagcaattcatatccaacataggtgtcacccgttcccaacgataaccgacatagatgtacttgttacttggagaggcttctaatttttggatgcgttgatagagctgctcccatttttcaatatccagatgtcccgcctgtttgggctcatttgttttccacaaggcaatgaaatccggtgctatttctttgaaagaaaactgattgaataattccttgactgtcatattgaatttcctcctttcttgttaaatccacaagcaactataataatcgataaatagttgtttatgccctatctatgtggcgttgttcctggagaagaacaatattgcccgattttttattgtgtcacaaatactctccaacttccttctttctcgccacgctcaacatactttttagaaatcagctgctccaatagtttctgaatagctgttatgctgatacccgtttcctctttcatatttgcaagagttagagaaggctgtgttcgcattgcattcagaatttttgtataattaggtgtccgaaatgcaatccgttccccatcataccaccatacattctcatttttttcgcttataaatagtacgtcattatatacttctgttgcgactaagttattaaagtatttcataaaaggacgaatgtccttaatatcagcacgtgcgccatcgctaggaaccggaccgacatcaagatctgcctgatgtaaagcttccagatattcacttttttgcgactgcgaacaactatcatgggataatcatggcgagttagaatatagttcaccatgagtcgtgcaatacgaccgtttccgtcttcaaaaggatgaatacgaatatagcgatagtgaaatagtgcagcgagttctacaggtgaaagttttccttcctgttctgctgcgttataccaatctatcaaatctcccatcaatcccggagtttcctcgggcgaggcatattcaaatctatctccatatcgtgtaataacactattaggacgtgttttatattgtccggcatgaattacataacttgtttgtattcctcctggtaaattgtggaatacagtataatcttctcgaagtatagttttatgcaaagttcggataaaattctgggtcagcggcattcttttcacggttgcttcttctgtcaccattcgtagcccgacattacttgctgccatttcttgtacatcatgcacatctgcttctcctattactttgccgaaaagtaatagaatttcagtctgtccgtaagttaatgtattaccctcaatatggttactgttataattgaaatcaacagtaaaacggcgactaagtctttccctgtctttctcagacagtggctgtaaattctgccatgctgtcagtactttctttatatttagatacttcatgtcgaatatggagctttaactataacaaatagtacaaagatagtgaaaatatcccataaaggttatagtgatacaacctttatgtgtttttttagaagtcactcttcaccttgttatttctttaaatgttaccttggattttcctcttttcttgttaaatccacaagcctttttcgtggcaaatacttgacatataataatagtattagtaataacagtattagtaataacaatatttcgtacctttgcactagaataagattgaagattatggagaacaagccttttatatttggcgttgccacatcaggtgataattttacagaccgagagaaagaaacggagcgtttattattgaatttccgacatggtgtcaataccgtactgatttcacctcgtcgttggggtaagacctcgttggtacagaaagtgtgtcgcttggctcaatccaacaaattgaaagtcgtgtatcttgacattttttcgtgtcgcagcgataaggatttctatgatgcatttgcggcagctgtacttaaacaaacatcttccaaactagatgagtggtcggaaaatgttaagttattcctttcacgtatcagccccaaaatctcaatgggtacagattcgatgacagatttctccatttcgcttgagatgaatcccaagggcaacgatgtggatgagattttacaacttccggaaaaaatagcgcagaataaaggttgtaatatcgttgtgtgcatcgacgaattccagcagattgccgagtttaaggattccaagacatttcaaaaacggctgcgcactgtgtggcaattgcaaaagtcggtatcctattgtctgttcggcagcaagaagcatttgatgaatgagctgttcgagaaaaagagcttgccgttctataaattcggcgatgctatctatctgcctaaaatcgggacttcggattgggtggattatatatgcagtcgttttgaagctacaggtaagcaaatctcaaaagaactggccgaaagaatatgtcaaatagtggataaccactcgtcttatgtgcagcagttggcatggttggtatggatacatacggacggaactgctaccgagcaggactttgaggcggcgtatcaagatattatcgaccaaaacactccattgttcgagaaacagaccgagagccttactacctatcagatgaatttcctgcgagctattttaaatgggattcatagtgaatttaccacgcaagaggttttgcaaaaataccaactcggctcgtctgcaaatgtaagtatcgtaaagcgggctttagtcaaaaaggaacttatagagatagagaaacggcaagttgtcattccagatccggtgatgaaagtatggctaaaaagggagttgggaatataatgcaccgatgaaggaccttggtcagaatttcactttttttgcgacttcggccaactaccatgggataatcatggcgagttaggatatagttcactatgagtcgtgcaatacaaccgtctccgtattcaaaaggatgaatacgaatatgctgaaaatattccataaaggttatagtgatacaacctttatgtggttatttttttaagaagtcactctttaccttgttatttcgcccctattgaatctaaatatagtgttgctatgaaaagtgctttttgatattatttgcattagcaatacctcctctgtgtttgaatgcgatatgtgcagttctagatactagtcgcatagtgcgacaatttgtgtcttcatgaggaacaagatcatgagcatctctccatttataaaaatcaggactacagttatttttcttagcccatactgttatctctttagctaaggattctgccatccttttttgtgcaacttcctggaaactcttctctcctccacctcgtttactaagttgttcacaagaataactttgatataaatctgagatattgacaacagatttgggataagttactttattgaaatcaggggacccatgttcatcataagaacaacttaaaaagttgattttctcaagttctttataaaatttatgagaactttcgagggtgcatattcggctattagctccatcccattttacatcactagttggagtaggactccataattgccatgcttcctctaatgcaccccatgtgttggtctttagaactgattttgctttattatatgtttctgaatgaccattactataaagagaatcaagagctaatctcatttcttctaagatattatatttagtgtatatcggaatatctgtataaagcttgctttctagatataatagctttttaattatcggttcttctttttccttttttttcttcttactttctttattgatgaatctattatgatgaagtggtttagttattgaaaattgttttacagtagtcatgatatccttataaatgtaatatttaatgatttctttataaatgaaatatccaataacgcatagaagagctatgagggcaaacagaataatccaacgtaaccagtttattccagttttatgagttaatttccataaagcaataggtgttgcttgtggtgttaaatgaatatcatttacttgatcgagttcattacctacgaccataacagagccatgaagaatgctatctcctactgttggattggcagtaaatgaaataggaataataacagatttaggacttgaaggaatgtttatttcatttaaagcattttcattgattataattcctttaatcttattcccgttttggtcaacaagtataattcgtcctgacgcatgacttctaacagcatcttcattgaatgaaatttgtagctctacaactttttttacagaatcaggcatttccatccatgaaaaaggaggaatgttatccaagaatttaaatgggtttggtcgataaataccatctccaaaatcaagttcgctcatgtttacaaatttacgctctttttcttcatcagaacaggatgggaatactccacaaataaacatgattgccactaaaatatagattagatttctcatttttcaagtatcttaatattcattattcgagtaccaacatttacaattttaaaattgtattcttcgggagtaaaaaatacaagtggatatttttctctatcatattcaattaaaatttttgtttgataggatataggaagattgttttgttcttttaattttaaaatttcaaacgtaagatagccattttcatctattgactcagcagcatttacaatccggtagttatcattttccggtattgaaatttttaatttgaacccttgattaaagatttcagggtttgtacaagaaagatgaagcttagctttgcagctatcaataatatttacactttgatgcatgttgccaattataaattcagtttgaatattcatagacggcacaagccacatctgcttcgatgcattcacaattctgcaaatttcttgctctattgcagcggatgaaagaagaacataaaaagcaaattgatatttttcttgtgtttttatgtgccaattactcagagcattataaagactatcaatgggttctcctgtattgtgtacaccgtctgtaagcataaacatgtaatttattttggttgaatccaacatactttcaccttttcgccaggcatccataatattagtatctcctttttttgtttttaaattcgcaatgtaattcaaaatcgaatccttatttgcaattttatccacatacagatctagtggtttgtctgtaaatgggataataacaatttccgatgtagtatcgttcattgaaactatagcattacttaattgttctttaacattatagaaaatatcctcagatcctttaaaaccttccatagaacgagtcagatccactaaatatattctgcgttcatccatcaatttggatgcttttgctttagcagaaaattttatgtttgaatctttcaatacctttccttttgaagttgtttcaccactcttttgattaaagttttcaaatagtgaagatgctttctcttgtacaatattagcaactttgtttactttgtcacaactatagcaaagtaacgataacataatagttataaatatatatcttttcattttgaaataatattattacttactaaggattccttatacatttgaaggtttgctcgaaaccttcttcacgtataaaatcaaatttatcattcataagtctgttttttgtctgtaaaggtgatgatattatataaatgtatcaactttattctaggttcataatggttcatgataacattatttagcacttgcagggaaaatccgagaattagattctaaaagagggtaaaaagaaaggagcacgtcctcactaattccctatttatctggttcggttctggaataacctggagtcaaaataagtaaaagcgaatccatgccccttgtgagggggtacagatagcctcaactaaattattatagactcctatgctcaaattttccagatttaaccaggtctaataatcagtcagccaacaatgcaatatgtctcaatcaaacaatgtctgtttcgtaatcgtttcttttaaattttactttcgcaaaataaacgatttttttcatatcggcaaatgtttcgattgattttatatcatggatcgcttattataaatataagttttctttactctgccgccttgaaattgaagatcggtttgatgatgttctctatggatactgtctgccggatgttttggatgatttcatcttttggtttgtacaccataggcgattcatctttggtctcttcgttcaggctttcgctgtaaataccctgcatggattgccggtattcttccatggagatgctcttgaatgcctgggcgcggctcatgatgcgtccggctccgtgaggggcggaatagttccattcttcgttgcctttgccgatgcagatgagtgaaccgtcgcgcatgttcagcgggatgatgcatttctgcccggaataggcggcaatggctcctttgcggatgatgttgtcatctccgatgtagttatggacgctttcgaatgccagattctgccaggctgtttcgggtgtctctacattgccttgccgggtcaggtggtccattatcagccctgtaatcatccggcggtttatttttgcccactgttggcacagacgcatgtcgtgcaggtaatcttcgcggaactctttttccaggtatgataaatctgccggaattgtcggcttgaacatcttgaaggaattatgcagcttgcggattgcttcctgcaactcgtcttttcgtccggcagccttgtattcggcaatcatccgattctgttcttccatcagttcagcccaaccggattggcatttcatggcgagtttctgataaatttgtgccacctgtttgcctaagttacggctgcctgtatgaactaccagataatgcatctcgttttcgtctttatccaactcgatgaagtggttgccgcctcctaacgaaccgcatgccctgttcaatcgctttatttctttcagttcgcgataacaacgcaattgttttatccatgatttgcactcggagtatgcctccatatatttgtttggcaatggtttgtattgttcggtgcggatattccttcccgacgggatgttttgcaggatgaactcattcaaggcatggaagtctatttctccccggcaggcaaacggttgtacgtagataccgcaaccgatatcaactcctacaatgttcggtatcacacgctctcccaagtttccggtgaaaccaatcacgcatccggctcccgcatgtacatcgggcatgatgcgtatcttgcattggctgaataccggtaccgacaacaggcttttgatttgttctacggcacttgattcaatgttgtccgtaaatatccgtacgtcatgattggctattgttttcatgtctgtttattttgaagtttctgatgcaaagtaagtatgcgaatgggcttgaatgcggcacaaggtaaaattatttttatctttgtggtaaatcattttcgaaaataaaaagttatggaagtgaattatttaaaacggtatgtgtggcttatcaatacgttgttgagcagggaacgcttgacttttgctgaaatcagtgatttatgggagcgtagttgtctgggtacgaatgagccgctcccccggaagactttcaataatcacaaggctgcaatatgcaagatattcggtatcattatcggatgcgaccgtcgtacgaaccggcattatatcgaaaatcctgaagtgttgacagaagataaagtgttgcattggctgtttaatatgtattctaccatgaatcagatgcaggccgatcagacattgaaagagcggattatgcttgaggatgttccttccggtcagcagtggcttatctttcttactcaggcgatgcatgacaatcatgttttgaaactcacttacagaggtttcgatagtgatgatgcctctacttttgaagtggagccttacggattgcgttttgccaaccgtcgctggtatctggtggctagaagtccttattattcggaacggaatcaaaagaccggcagtggaccgaaagatgtatatcgggtgtatgctctcgatcgtattcaggacgtagaggagttggaacgatcattcgatttgaatgaaaagttttctatggaggaatatttcaaatattgttgcggcgtacacaatgaccctcaagatccggtggtaagattggtcatcaaggcatacgaaaattttgccgcctatctgcgcactttgcccttgcatgcatcgcaacgggagttggaggggaatgaggattatgtcctttttgaatatcatgtgaaggtgaatttcgagctgtatcagaaattgctgttccaagccgaccagatagaggtagtcgaaccggagtctgtccgggagaagatgcgtgagtttacgcgcaactttatgaagtattatggtacgtgatttctcccacttaaattgatgtcaaatatatctcaaacagtagtcaaagataatagtttgttatctttgatatatatttgtcttatctttgatatgtatttgacatatatttgaatgggaggggatatagcgagaagagggaaggaattatgacgaaatattcagaaaaatattttgccaaatttccaaataattaaacagcatttttccaagtgtaactcagccatttttccaaataattctcagaaatatattgaattacaaataaatgaactatctttataccaaaatacaattctatggaatataaaaaacgaatagcagatcaacttctgcgtgataaattaggctcggaggatttgcgccgttggtagagctgccaggaattgaacagattgtgccatacactgtagaatcctccggcaatggcggtgaccggtgtgaaaaaggtgtagcccatccagatggcaaatacagtgttcttttgtccgagtgattggccggcactgatacggtcgttgtagatttttcctattcttttgcctatatagaattgtatgatgcaggatatcaaagaaactacagccaatcccagttggtagagaatgtcgatttcactatgtacaatactttttaccgtgacagcgatggcgagggagagagctattgcccacatgtagaaagccaattcgtggtagcgtgccaacagggcatgaagttttggaaggaggtagcggattaatacggcagcaatgaacgggcatagtaaaagcgggaacactttccccaatatgagggcaaaggagttgccgaatgtcagatcgggatgagggtgtaccagtggcacgataagcggaacaagtacagccgctatcagattgatgagtatggtataggtggtgaggtgtgcggcattgcctcccagtttttgtgtgacaacggctcctgctgttgctgtaggacatatcagacagaccatggctccttctattaggattctgccgggaaggttgcggaataatattaaaattgcgcctaaaagagtgaaactgaacccttgtattaataacaaccacaagtgccaacggcagggacgaaggtcgtgtagctctactttgcaaaacgaaagaaacagcatcataaaaatcaatgccggttgaatgaaattgactgcgctgttcacccaaggacgtgtcggttccagaaaaggaatgttcacataaatgaaataaccggccactccgctcagcatggcaatcggcaaagtccagtttttgatgaatcggatgatttccatgattttgtttgcaaattaatcaatggtgcaaaggtataaaaaagaagctgtcttgattggaaggcagcttcttaaaaaaaggatgtttttttgtattattcgcgacggtttaggaatatcattacataatataataaggttgccagtgatgaaagagcggcgacgacataagtataggcagcccatttaagtgcgtcaaaggcatattcctgagtctggtagttggtcacgccggaattgcgaagccatgccaaagcgcggtggctggcattgatttcaacagggagggtgataaaactgaataaggtcataatggcaaatagaccgatacccatcaacagcaagccaggaaatgcatggagcaataaaattcctgccaataaaatccattgcacccaatgtgaggcaaattcaacggcgggcaccaaggatgaacgtagctgcaacatactatagcccgtggcatgttgtagggcgtgccctgtttcatgagcggcaacggcagcagctgcaatgctgttgccataatatacatcatgactcagattgatggttttgtttaccggattatagtggtcggtaagcataccttgtaccgagccgatttttactcccgtgattccgttgtcgcggagtatcttttctgcaacatctctgccggtcatgccgttggctgtcggaatttgagagtattttttaaaacgactttttaattggttgctgacaagccagctgatgagggtaaatcctatgaatataatccaaatccacatgtttcctcctgacatagttgtgtatcccatttttgttattattttgagttatgttgtagtgtgttgcaaaaagcgcgccaaactttttaatggcataatttgatttgtgtcttgcttttttgagattttaattctatattacagcgtcatttcaaacgtttgaaatgatactacaaatataaacctaaaacctatatagtatgaaaacctataatccgaatgaaatcaagaatatcgctcttgtgggcagcgccgggtccggtaagaccacgctggctgaagcgatgatgtacgagggcggggtcatttcgcgcagaggtagcgtgagtgcgaagaacacttcttccgattatcgccccgtggagcaagaatatgggtcttctgtattcccggctgttttgtatgctgaatggaaggaacagaagttgaattttatagatactccgggagctgacgattttgtcggaggcgttatttctgcgctgaatgttgcggacactgctgtcatggtggttaatgccgtgcggggtgtagaggttggtaccgagattatcagccggcatttgcagcgaatgcataagccgatgatttttattgtcaatcagttggatcatgaaaaatcaaatttcgaacagaccgttgaacatgctcaggcatcgtttggcaaaaaggttgtgttggtgcagtatccggtgaatcagggaaccggctttaatagggtggtggatgttttgaagatggagatgtatcagtggaagccggaaggtggaaagccggatgtattgccaattccggaagaggagaaggaaaaagccaatgagttgcataatgctttggttgaagctgcagcagagaatgacgagggtctgatggagctttattttgagaaaggaagtctgacggaggatgaaatgcgcgccggtatccgtaagggattgattgcaagggatatgtttccggtgttttgtgtatcggcagagaaagatatgtgtgtgcgccgttttatggagttcttggtaaatgtggctccgaatgctgctgcgatgccgggtatggagacgaaggacggcaagctggtgccatacgatgtgaacggaccgacatctgccgttgttttcaatacaacaattgaacagcatttgggtgatatcaattatttcaaagtggtgtccggtgttgtgaaagaaggggacgacctgattaatatgacgacaggtacgaaggagcgtattgcccagctgtatgctgtggcaggtaagaaccgtaccaaagtgtctgaattgcgtgccggtgatatcggtgcaacggtgaaattgaaaggtacgaagaatggtgatacgctcaacagtaaggattgtgattatgtattcccggcaattgtttatccgaactcacgtttccgtacagcagtccgtgccgtgaataaggctgacgaagagaagatggcagaggtgctttatcgtatgcacgaagaggatccgtcgttgttggttgagtattctaaagagttgaaacagatgattctgtccggtcagggagaattccatttgaatacgatgaaatggcgtatcgagcataatgataagattaatattgaattttatgctccgaaaattccgtatcgtgaaaccattaccaaatatgcacaggcagattaccgtcataagaaacagtcgggtggtgccggtcagtttggagaggttcacatggtaatcgagccttacgaagagggtatgccggaacctgtatcttataaaattggcggagtggacagcaagatgtcaatcaagggcaaggaagagtatgatttgccatggggcggtaagctggtgttttataactgtattgtcggcggtgtgattgaagctcgttttatgcctgcaatcttgaagggtattatggagaagatggaggaagggccgttgacaggttcgtatgcccgtgatatccgtgtatgtatttacgacggtaagatgcatccggtagattcaaatgaaatttctttccgtttggcaggacgccatgctttcagtgaggcatttaaaaaagccaatccgaagattttggagccgatttacgatgttgaggttttggtgccggatgaggatatgggagatgtaatgggagatttacagactcgtcgtgcgatgattatgggcatggaggctgatagcggtttccagaaattgatggctaaagtgccgttgaaggagatgcagcgttattcgactgctttaagctctattacaggtggacgtgcaacctttaccatgagttttgccggatatgaaaaagtgccttcagatgttcaggaagagttgctgaaggattatcatgaggctgatgatgacgagtaggattatataaattgtaatataggaggatgggatccatatcatgtgagcccatccttttttattttgccggaaaaaagttagttttgtagggtaaattttaatgagatgaacttattttatacaccggatatttcaggggattattatgtattgagtcccgaagaatcaaagcattgcgtacgggtattacggatggaagccggagagccggtagtgttggtggacggacggggaaattggtatgagggagaaatcgatcgggcagaggctaaaggatgtggcgtgaggattttggagaaaaaggaagaatatggcaagcgtcctttccggttgcatttagctgtggcgccgacaaaaaatattgataggacggaatggatgttggagaaatgtacggagatggggatagacgctattacaatgttgaattcggagcattctgagcgcaaggtggtaaaggacgaacggctggaaaaggtgttggtggccgcgatgaagcagtcgcttaaagcatatcttccggagtttcatacgatgacaggctttaaggattttgtagcggcttgtacagagaagcataagtttatagctcattgtcatgccggggaaaagctgcgtctggatgaggcttatcagccgggagatgatgtggtgattttgatagggccggagggcgatttctctgaagaggaagtggcatttgcagaaaaaaacggtttccgggccattactcttggatgtagccgtctgagaacggaaacggcaggtattgtggcttgccatagcattgattttatgaatagggtatagtaatggaacatatattacaaattgtagctatccttgcattgtttattatagtgcctaggtggttgtggggtaagaagacggagcatccggatgaaaaataaatatggcgttttacaagacaaagcactggcattttgtcacttgtaaatgcaattgcaatgacaagatgtcagaaaatctgctataattgctttgaaaccttttgacttttgaatcggtatatgttttgtattttcatcagtacaataaattactaagcttatgaatacaaataattatactatcaaatcgcaggaagcattgcagcatgcagtgcaacttgcacaaagcaaaggacaacaggctatagagaccggtcatttgttgaagggggttctcaatgtaggtgagaacgtcactcagtttatttttaataaattgggggttaacagcagaaacctgatggctgcattggacaggattgtagattcttatcctaaagtgtcaggcggagaagcttatctttccggagacagtaataaagcattggaaaaagcaacaagactggcgaatgaaatgggcgaccagtatgtatctttggaacatattttattggggttgcttgataatagggatcaggttgcacaattgttgaaggatagcggattgacagagaaggagaccaagggggctattgccgaattgcgaaaaggttctaaagtgaattcccagtctgcagaggagagttatgatgctttgggtagatatgcaatcaatttgaatgagcgcgccagaaacgggaaattggatcctgttatcggacgtgatgatgaaatcaggcgagtgttgcagatattgtctcgtcgtaccaagaataatccgattttgattggtgaaccgggtgtcggtaagacggctatcgctgaaggtttggctcaacggattgtgaatggggatgtcccgtctaatttggcatccaagcagatattttcattggatatgggagccttgattgcaggtgccaaatacaaaggtgaatttgaggagcgtctgaaagctgtggttaatgaggtcttggcatcggaaggagaaattattctgtttatagatgaaatccatacgttggtaggtgccgggaagtcggaaggggctatggatgctgccaatattttgaaacctgctttggcccgtggcgatttaagagctattggtgcgacgactctgaatgaatatcagaagtattttgagcaagataaggcattggaacgccgtttccaaaaagtgatgattgatgagccggatgtgatgagtgctatcagcattatgcgtggtttgaaagagaaatacgagaatcaccataaagtgcgtatcaccgatgatgcaattatcgcttctgtagaattgtctcatcgatatatatctgatcgttttttgccggataaggccattgacttggtggatgaggctgcagccaagttgcgtctggagatgaattctgttccggaagaaattgatgaattggatcgaaaaattcagcaacttgaaattgaaaaggaggctttaaaacgtgaggggaccagtaaaaaactggatgaaatccagaaagaactggcagatttgaatgatgagcgtaccaaattgcgtgcacaatgggagtctgaacgttcgttgattgacgagattcagaagaataaagatgctattgaacaattcagatttgaagcgtctcgtgcggagcgtgaaggtgattatggtaaagtggcggaattgcgctatggaaaaatcaaagaggctgaacaacggattgaagaggtgaaagcccggttggcggatatgaagcatggtcaatcattgattcgtgaggaggtgacttctgatgatattgcagctgtcgtttccaaatggacaggcattccggtcaatcgtatgatgcagagtgagcgtgcaaaattgttgcatttggaagaggagttgcacaaacgggttgtcggacaagatgtagcaattgctgcattggctgatgccgtacgacgtaatcgtgccggactgcaggatgcccgtcggccgataggttcgtttatctttctgggaacaacgggtgtcggtaagactgaattggcaaaggctttggctgagtttttgtttgacgatgagtctttgatgacacgtattgatatgtctgaatatcaagagaagcattctgtgtctcgtctgattggagcgcctccgggatacgtcggttatgatgaaggtggacagttgacggaagccgtaagacgtaaaccatattctgtcatattgctcgatgaaatcgagaaggctcatccagatgtattcaatattttgttgcaggtgttggatgacggacgtttgactgataataaaggacgtacggtggattttaagaacaccattatcattatgacttctaatatcggtgcacatattattcaggataagttgaaagacttggatgataataatcgggaggaagttctggaaaagaccaataatgaagtgtatgaattgttgaaacagacgattcgaccggaatttttgaaccgtattgatgaggtgattatgtttacgcctttacgaaagagtgagattgttgatattgtacgtttgcagatcaaatcattgcagaaaatgttggctaataacagtatctcaatagaagtcactgaccgtgctgtggaatggatagctcaagaagggtatgacccgcaattcggtgctcgtccggtgaaaagggtaatccagcggaatctgttgaatgatttgtcgcggcagatattggcagagcaagtgacaaaggacaataatattgtggtggatgtaaaggatgatcacattgtatttgaaaataaataacaaaattggttgttgatgtgaaaactgcggagtctttgggattccgcagtttttttttgtcgtatgatagattttctttatcatattattgatattatcattaagaaatgtggggggatattcatttataatacttacatttatccgttgaaaatgtaatagttagatataaaatatagaaaaagatatgaagcagaaatctgacataggcttgataggtttggctgtaatgggcgagaatcttgctttgaattttgaaagtaaaggttttacggtatctgtatataaccgaattcatccggaaagggaaaatgcggtggatcgttttgttaatggacgtggggcaggcaagaattttcgacctgcatattccgtcaaggagttggtggaatctcttgagcgtccgcggaaggtgatgatgatgatacgtgccggtgagcctgttgatgaaatgattgggcaattggttgagtttttggaaccgggagatgtaattatagatggtggaaattctgactttagagatacagaacgtcgggtgaaacaaatggaagagagagggttgctttatgtcggtacgggtatctccggaggtgaaattggtgcattgaccggtccgtcggtaatgcctggaggttctcctgcagcttggcctttagtgaagaatctgctgcaaagtgtggctgctcatttggaggatggtacaccttgctgtgaatggattggttcaggaggagccgggcattatgtaaagatggttcataatggaattgagtatggtgatatgcagctgatagctgaaagttatgctatgttgcgtaattattggcagttggataatgatgagattgcggatgtttttgcggaatggaatcagggtgagttggatagttatctgatggagattacttctgagatttgtcgccgcaaggaggcggatggcagttggttgcttgatcatattctggatgccgccgggcagaaaggcaccggaaagttgacggtggcagcagctttggatgaaagtgatccgttgacattgattgcagaggctgtcaatgctcgttttctttctgcaattcgagatgaacgtatacaggctgcatcgttatataagaaggaagaggctgttcctcagacaactgttcctacagagacattgcgtcatgctctttatgcttctaagctgatttcttatgcacagggtttttcgttgttgcgtagagcttctttgcattatgggtggaatctggatttaggaatgttagctcgtatatggaggaaaggatgtattatccgttctgtctttttgggacagataacgcgtgcgtatgaagttgctccatctttggagaatttattgttcgatgattttttccgggcacgaatccaggaagcgttgcctgcttggagacaggtggctgctattgcaataaccacaggaattgcagctccttgtatggtctccggattggcttattttgatggattgtgtacaacaaattcttctgcaaatattattcaggctcagcgagattattttggagcccatacgtatgaacgcatagatgctcctcggggacagttctttcatacggattggaatgaaacaggaggaagtgcatctagaacttataatgtatagaaaatgaatgttggtaatttattaataatggtgtagatatgacaaaaccggaaaaccagatattagtgatttttggagcctcaggtgatttgacaaaacgtaaattattgccttcgctctttgaattgtttgatcgcaaccttttgccagagcattttgtgattttgggtgtcgctcgtacagctttttcagacgaagagttccgttctgcgcaaaaagaaaatttaaagcagttcctgaaaggtgagaaaccaacagacgaacgattggatgcctttttaaatcaagtgtattaccttggtttcgatacagacaaggtagaggagtatcatttattggctgagaaagtagctacgttgcgcgctttacatgatatcccagataggcttctttattacttggctattccgccacaaaaatatgcaattgttgcatcggcattgaaagagagtgatttgcatcaggcacaagatgtaaatggttggagacgaattattgttgaaaagccttttggaagtaatttgcagacggcgcaagagcttaatcgtcagctttgttctatttttgctgaagatgatatctatcgtatagatcattttttaggcaaagagacggtacagaatattcttgttttacgttttgccaatcagatttttgaatcgctttggaatcgcaattatattgattcggttgagatatatgcccaagaaaagttgggtgtagagaatagaggaaaatattatgaaggggcaggtgctttgcgtgatatggtgcaaaatcatttgatgcaattgatggggtttgttgccatggaagctccggctgcttttgatgcagaactgatgcgtgatgaggtagcaaaggtttttcgttctttgcatccgttatctccggctgatgtggttcgtggccagtatacttctgggcaagttggtgagcagcaattgccggcttatcgagaagaaaaaggtgtatcagcgtcgtcaacgactgaaacttacgtggcaatgcgtttttatatcgataattggcgttggggtggtgtacctttttatttttatacgggtaagagaatggctgcggccaggtctgagattgtgattcatttcaagaatgtccctcaccatttgtttaatggaatgtgtacttacggttcatgtaatcagttggttttgaaagtggattctccggagagtatttcattgaaatttggtttgaaagtgccgggttccttttttgaggtgaagcaagtgagcatggattttgcctataattcattgtgtaatacttatattgctacggcatatgagcgtttgcttttggatgctatgcagggcgattcaacactttatacccgaaccgatgcgttggagttgagctggcgttttattgatccgatacttgaatattgggcgaaatatccggaacgaggtttgacttactatgctgctggtagtgagggaccggaagagcgtaagtggcttcttcaacgtcgccttgccggaatggatacattgtaacaaaaaagccaccttgaaaggtggcttttagctcctcaggtaggacttgaacctacgacctacggattaacagtccgccgctctaaccaactgagctactaaggaatgttgcttttgagtgtctgataacttggctcctcaggtaggacttgaacctacgacctacggattaacagtccgccgctctaaccaactgagctactaaggaatttccctcaaaagcgatgcaaagataggtgcttttttgaaacctgcaaaattttgagcgaaaaaatatcgataaaaatgatttttttcttggaaaatatggttggaagattcttggaaatatgctcgatatgcagcaaatttgctgaaaattaaattgattgactatggattattttaaggaagtgaatctggctgtcaccatttgtgacaaggatggtaagattatagaaatgaatgataagtcccgtaagacctttttgaagcctggacgtgaagatttgattggtaagaatgtcttggattgtcatccggaaccggctcggtctatgttggcagatatgttaaagaatccgcgcacaaatgcctatacaatagaaaaagaaggtgtaaaaaagctgatttatcagactccttggtatgaaaatggtgaattcatgggatttatggagctttcaatggaaataccatttgagatgaagcatgcgataaggactccaaagaaataattttgttaattttgcattcgacattatttatatcatctaagaattgggattatgagagtattattattgggaggaggaggacgtgagcatgccttggcatggaaaatagcacaaagtccgcagttggaaaaattatatatcgcaccaggtaatgctggtacggctgcgctagctgaaaatgttggtattgctgttacagattttaaagcaatagcagattttattgcagagaagaaaattcaattgttggtggtaggaccggaagatccgttggtagagggaattcgtgatttcttacaggcggatagtcgttttgcagaattgatgattgtggggccgggtaaagatggtgcaatactggaaggtagtaaggattttgccaagcagtttatgcagcgtcatggaattcctactgcgggatatatgactgtgacttcaaataatatcgcagaaggacaacaatttctagccactttaaagcctccttatgtactaaaggctgatggtttggctgccgggaagggagtgctgattattaatgacttgaaagaagcacaagatgagctgaaggagatgttggatggaaagttcggaaaagcaagttgccgcgtggtgattgaagagtttttgcatggaatcgagatttctgtttttgcaataacagatggtaaagattataggatcttgggctctgctaaagactataaacgaatcggcgagggtgatacaggattgaatacgggtggaatgggagccgtttctccagttccgtttgctgatgctgaatttaataagaaggtggaagaactgattgtgcgtcctactgtggaagggttacggaaagatggtattgactatcgtggttttattttctttggtttgatgaatgatggtggcaatcctgctgttattgagtataatgtgcgtatgggggatcctgaaacagaggtcgtgatgccgcgtttgaaaacagatattcttgagttgttcgcagctacgtcaaccggtcgtttggcagaagctgcatttgaattggacgaacgttattgtacaacagtgatgttggttgcaggtggatatcctggctcttatgaaaaaggtaatgttattacaggattggagaatgtaaaagacagcatcgttttccatgcaggcacaaaattggctgatgggcaagtcttgactaatggaggccgtgttatggcagtcagttcttatggaacgactatggaggaggctcttgctttgtcgtataagaatgtagagcatctcaaattcaaggatatgaatttccgtcgtgatatcggacaggatttgttgaaattggttcgttgatattttttgattgattatagatgaataaatttttacaatccaagagtctatatatgctttttatattgccgttcatagtagcggcacttactttgttaagtaagtgggtgccgggacatcagatagcaagtgttccggtacatggctgtatagacattgcttttatccattcgttaaacgagacatggcaatctgtcataggtggtgttgtgatgcttggtgtggcatatatgatttttttgattagtaatatttttaaattgctgtatcaacgaacgaccttgccttctttgctatatatcttgttgacttcgggtattatggtaagtattggatttaattatctgctaatcgctgtttttattgttggccttgcagtggcgtgcttgcagtctgcgatttacaatacaaaaaataatgcctctctttttgattttggagcattgatgatgttggcagtagcgatttatcctaagtttgttcttttgttgatatgggctttgtgtgcagtgcttttctccggacgttcaacggttaaggatgtaatggctttgcttgttggattttgtgcgcctgtcatttttgtcgttttttattattattggactgattcgttggcaatgttgcccgggcggtttatgacaagccttacaataggcaattatattcatcatttgcctacggtagagataatacgtttgtgcttgttgtttatgttgctgatggttgccttgttgcatttctttttgaaatattcggcaatgatggtttatcagcgtaggggaatgacctctttggtctcgatgttattatttctgattgttactttggttgccgtaccgggtaattattatgattttatgtatatgctggctttcccgctggtttttatttattcgcattattttattgtccagcgggtgaagatggtaaatgatttgatgtttattctgttgctttgtgcttgttttcttagttattttatctgataaaggtcagtagttcgcctcggctgtctgaagggaattctcctcggtcataaactataattccgttgactattgtggtacgtacctgatagtggaaagtttgtccttccaagggagaccagccgcattgatagaggatattctctttgctcactgtccagctattcttttggacgatgcaaatatctgctttatagccttcccgtaagaaaccacgtccttcaatgtggaatagtcgggctggagcgtgacacattccttcaacgactttctcgtatgtaatttcgcctcgttctgctaattccagcatgatggtgagggaatgctggaccaggggtcctccgcttgcagcttgtgtgtatgaaccgctcttgtcttcgatggtgtgaggagcatggtctgttgcgataatatccaacacaccttcattcactccttttaatagtgccagacggtcattctccgtttttattgcaggattccagcgcacgaaatttcctttttcacgataggcttcatcattaaaccataagtgatgtacgcatacttcaccggtaatcattttttcttccggtagtccgcggtcaagtaaagcaagctcttcggctgtacttaaatggagtatatgaagtctgcttccgtattttttagctaatgtagttgccaaggatgaactttttagacaagcttcacggcttcgtatgagagggtggcaataagcaggaatgtcgtctccatatttttctttataaagcgcaaggttgctattgatagtgggcgtatcctcgcagtgtgttgcaatcaataaaggggattctgcaaataaacgttccaatgctggaattccatttatgagtaagttgcctgtagaggctcccatgaatgcctttataccacaagtcgtacgaggatcaactcgtttgatttcgtcgatgttattgctggtggcacccaagtaaaaagaatagtttactagggatgttcgggctgcaatttcttgtttttcgcgtaaaagggcatttgtagtggtaggcggttttacattgggcatgtccatgaaggaggtaacacctcctgctgctgcagctttactgccttctgcgatatttcctttgtgggtcatccccggttctctgaaatgtacttggtcatcaataacgccagggagcacataacaattttcagcgtgtatgatttcacaaccttccgtatctgcctctggagtaatagacaatattcggtcgttttcgatgatgatgtcagctttatattgcttaccttcgtttatgagtgttcctcctttgatgacctttttcatatcaatgtttaattacgttttttgattttaccgaacatggcacggaatttcatggtaatcactccaaagacggcttctttgatgatacccttactcattttagaagttcctaatgtgcggtctgtaaatataattggcacttctttaagtgcaaatcccaatgttgttgcagtaaatttcatttctatttggaatgcatagcctttgaaacggatgttttccaaatcgatggtttctaaaactttacgagtgtaacatacaaatccggctgttgagtcgtgaactttcatgccggtaatcattctcacatattttgatgcaaaatatgataacaatacacggctcatgggccaattaacaacatttacccctgttacatatcgtgagccgacagataggtcagccccctctacacaagcttcataaaggcgtaccaagtcatgaggattgtgtgagaaatcggcatccatttcgaaaatgtagccatagccatgttccaatgcccatttaaatccggtgatataggctgttcctaagccgagtttgccttttcgttccaccatgtaaagatgttcgaattcttgttgtagtctcttgactatggcagctgttccatccggagaattgtcttctataattagaatatggaattccggttttaaggaaaaaacacaacgaacaatgttttcaatattttctttttcgttgtatgtggggatgatgactaatctgttattcactgtttcaaatgattagagacattctacaattcgttccaaacggtttccgcgagagcctttgatgaaaatgaatgattccgtcattggttttgtccggagcatttccatcagagattccgtgttaggaaaccaagtgataaaattacatttctctttgcaatgttcaaaattatttccaatgagaaataatttctcaatattgccttgtaaagctaaatttacaatatcttcatgcgccttgctgcttgaagaacctaattctagcatttcgccaagaataaggactttatgttctcctggcatttcgcagaagttatttacagatacctgcatactgctaggattcgcattataggcatccaagataatggtgttgttttcgctttttattagttgtgagcgtaaattcgatggatgataagtttcaatcgcctcttgtatttttagaggatcaactccaaaatggatgcctacggctgaagctgccatggcattgtcgaagttataacctcctactaaatgggtcttgatataaagttgtcctttgggagcaatgatggagtaaaccagatagggaacagtttgttttatttctccttctagaagatttcccttgattccataagttgctcggtcatggccttcactgagttgcatcagtaatttgtctgaagcgctgacaaacactttacctcctttggcaaaaacatgttcgtatagggcttttttggtagcaataatgttttcatagctaccgaatccttcaagatgggcataaccgatgttggtgataagtccgaaatccggatcggcaatggcacataagtctcggatttctcccggatggttagcgcccatttctacaatgccgaattctgtcgtttcgtccatgctgagcagagttaaaggcactccaatatgattattaaaattgccttgtgtggcaaatgttttgtatttttttgataatactgcatgacagagctcttttgtcgtggtttttccattggtgcctgtaatacctaaaatagggagaccaagccgtttacgatggtaatgtgctaattcttgcaggcattttaatgtatctttgacgagaatacatttttctccattgtatttcggattgtcgataatggcagtagtagctccatgttctatagctgttaaagcatactcattgccgtcaaaattttccccttttaaggcaataaaaatgtctccgggtgtaatttttcgtgagtcggtttctacatgatgaccgcggacgaactgttcatatatttcagcaatattctctatcatgatatataagtggcgattcttttgtttaagttggaattcccattacaaatttaggggattttcttgaaaaagtactttattgtgaaaggatattattgggaaaaagtttttatttttgaatcataaaatgtatcgtaatagacaaaggttatactatgagaattaaaacaggtattggaattgatgttcatcgtcttgaagagggattggacttttggttgggaggcattaaaatcgaacattccaagggatgcgttgcgcattctgatggtgatgttttgattcatgccatctgtgatgctctattgggagctgctggattgggagatattggtttgcattttcctgacacatgcccagcatataagggtattgatagtaagttgttattgcaaaaaacaaaagaattgattgaaaataaaggatttgctattagcaatatcgattctgtggtgtgtttgcagcgtcctaaaattcgtctttatattgatgatatgcgtcgatgtcttgcagagattttagaaatggatattgaggatatgtcaattaaggcgacaacgacagagcatttggggtttgaaggacgtgaagaaggtgtatctgcttatgcaacagttctgatatataaattgtaagtgaatatacaaaaagtggctgttataataacagccactttttttgtattaatacatatagtcccaaacaggtagttgtaccggtttgccttttaatgcttcgatagctttttcattcaagtatgctttgcgaatcacaatgcggaacatgtattcgtcaaaccatttgtctgtaaatgtcaaatagccattgtgtccattatcagcaccccaactgttttcgaactcccattttacaggcttgtcgtttgcatctgtatcacagcctaccaaggtcattgcatgtgcagagccgctctgacgtgtcaggatgcgagcttttttgtccatatgcagtttaacccccaataatgattcataatcatacattgccggatccaatattccttcttctcggttgaattgtttgcctacatcacatgatgcatacatgggttcattgtttttgatagatgtcaaagctgcaactttgatgtcttcgttcggcaaattcagataaatccagttaataccctcttgcgtattgcgataattctgtatttcatatactttataatactcgcgagtagggtcgttcataatcatgatatagttttccggggtatagtctgccggagtgatttcatcatagaactgcttgggtgtatagttggctaactctttgatttctccatttttggttttatatctccaagtgaattcatgaggaggttcgcctaagcaaagagcaaggattctatatacgtctttcaatacgtttttcttttcgttgcgtagctcttttgcttttttgccacctgctgccatttcacgcaatgtgtaaccgccgagacgtaatttttcatttaccagactaagcaattgtgctgtgttgtttgagtgtgctgtttctggcatcacctcctgcggtactacgccatatttcttggctgcgttataataaagattccatacgccaccgtctccaactgggttcttgaaatattctactacggcacggtcgtccattggcttgtctgtggtagcaataatgttttccaaaaacagattactcttttcaaagatatcccagaaatatagatagttgtgtgaaaaatcgaaagcgttgagattatattttttcataatctgtggacgcaatacgttcatggaggtaaacatccaacaacgtccggaactcaattggtttgtgattccttttacatctgcccgatatttgaaatagtggtcgattttcccttgcaaatcacggtttagtgcattctgacggatatttttatccacagtcagaatgttctggatagcttttgttgatgcgtcttttttgaaacttgcttgaatctcctgcaaatctttgtctgtaatgctttgggcaaataccccagagcatgcaagcagtaaacttgtagcgattaatgttcttttcattaaaattgattttattgttattgattatttataaatgtattacttcgtcatatgctgcagctgcggcttccattacagcttcgctcatcgtcggatgaggatgtactgttttgatcagatcgtgcgctgtcagacctttttgtctggcaaccaccagttctgcaatcatttcagtaacattggcacccaccatgtgtgctcctagaatgcttccgtctttagcattgaaaatcagtttgatgaaaccgtcatttgctcctgcagaacttgcttttcctgaagctgtaaatggaaatttaccgattttcatttcataaccggcctcttgtgcttttgcttcagaaagtccgacagaagcaacttccggagttgtgtatgtgcagccgggtatgttgtcgtagcggattggttccggagtcataccggccatcttttctacacaacagatggcttctgccgaggctacgtgtgccaatgcaggtccatgtacaatatctccgatggcatatacaccttctacgttggtacggtaataatcgtccacttttattttgccgcgttccatttcaatacccaattcttcaagtccgatattctctacattgggcgcgatgccgacagctgacaataccatttctgcttcatgaacttctatgtctccttttttgtttcgaatattgacttttagcaattctcctgttgtatcaatgctttctacagtagatttaaccatgacattgattccggcttttttgaatgaacgtcccacctgtttggatacttcttcgtcttccactggtaaaatattgggcataaattcaaccaaagttactttcgttcccattgaattatagaaccaggctaattcagaaccgatagctccagaaccgactacgagtaatgatgcaggacaatggtctagtgtaagtgcctctcgatatccgatgatacgtttcccgtcttgagggatggccggtagtacccgtgaacgggctccggttgctaaaatgatatgttttgctgtatataatgttttttctccttctgcatcggttacttcaacttgcttgtctgctgttagtcttcctgttcctgcgataacggtaatattgtttttcttaaagagatattgaattcctttgctcattttatcagcaacaccccgacttcgtgcaataattgctgcaaaatccggctctgcgctttctatcttgataccatatgattctgcatgacgagcataatcaagcacttgtgctgattttaaaagcgatttggtaggaatacatccccaattcagacagattcctccttgttctgcacgttccacaacagctacattaaaccctagttgggctccgcgaatggcagctacatatccaccgggaccgctaccgataaccattaaatcgtaattcatatttttgttggtatttgttatttcagttgtattgtattagcgcatttcagcgcgagagcaaaaataaaaataactgcacacttttcaaacgttttcaaaaaaagagttcttctcttttattatgcagaatgattgatgcgggtccatccccaacttaacacaaagagtagcagaaagcagactacaatagtcgctcctgtaggggtttggagtgtggccgcaataaaaagtccagctaccgagccaatcatactgatgagcgaagaggcaacaagttgttgcgtgaagttcttgtagaataatccggcaatagcttgtgggatcgttaaataagatatgattaatatgatgccggccaatttcaggcaaacgacaatgcaaagcgcaataatcatagtgatggcaatgtcaaggatatttacatgtacgtggtgggtttgactgtattctttatcaaatgcaatgtaaaaaaggggacggtagaagcaggcaaaaaagaggactactatcagacaaagaactcccgttagtataatttgtcctgtagttacagttaagatgttgccgaacagataggagataaggttgggtgcataccctggagtcaggtaaataaaaaggatgccgatagccatgcctgccgaccagaagatcccgatgagagaatcttcacggaattttttattctctcctaaaaacagaatccccaaagctgccaattgtgcaaaaacagttgctcccagcataggcgaaagccccagataataggacagtcccaatcccccgaaggaagcgtgtgtgatacctccactgataaataccatccgtttggctacaatataggtacctacaaggccgcagcatatgctgataagtatggtactgataagtgcattttggaaaaaatcgtattgtagtagttcgaacatagttgttatattggttgtttttattggtgatttgataaaacacgatgaggcacatgtccgtgtgtgatgagttcaatcgggcagttgtatgcttgaagttgctctggtgtaattaggttggaatgatgataatgtaattcccggtttacgcaggcaatggtttttacatacgaacagattgttcctaagtcgtgtgataccattacaatactcatgcttttattcaactcttggaggatggggtaaaactctttttcaaagttactatccacataggttgtaggttcatctaatatcagcacttgaggcgaagagatgatagctctgcaaagcagcacacgttgaatttgtccgccggataaatttcctatgggcgtatttttgtaggctcccatggcatatttgtctaataaagagtaagctctttctcggtctttttttgtatacgaacggaaaagtcccttgttcgacatgagtccggacatgacaacttctgttacactaatgggaaagcgttggtcgaaacggtttgtttgcggtaaatagccgaaaagattctgtaggggagcatgataggtgatttcaccggttgacggctttatcagacctaatattacttttaataacgttgttttgccgccaccgttggggccgatgatgcccatgaaatctccttcattgatgcagaggttgatatgctgcaacactgtctgataatcatatcctgcggatacgtcttttaattcgagaatgggcttcataacttctcttgtaatacttttatgagtttattgatttcctctgtccaattttctgccaaagggtcaatggggatgacttctcctccaatttctttggctacagataatgcgttgtttttatcaaattgactttgtatgaatatgatgcgaatatttttttcttttgctaaatcaatgatatgctttaaatgagctggattcggttctttcccttcattttcgatagcaacctgctgcaaaccatagtcatcggcaaggtaagtcaaggcgggatgataaatgagaaacatactgcctcgtttttcatttaacgcactgtcggctttttcctttacggtctcgatttctttggaaagagttttatatccttcttcaaatttttccttttgggttggatattgttcggataatgccttgaatatctgttgtgccatttgggcaacatagcgaggtgacgaccaaatgtgagggtccactcctgaatgttcgtgtccgttgtggtgctggtggccgcagctgccactgagcagttttattccttctgaatgattgataatgcggatatcttttcgctgttttatcacaggagcaaggtgtgtcaattcaaaaggaagatggccgatagtgaagcaaatatcgctgtcatataatttttttaattgttcagtgctgagatcacaggtttcaggactcatccccggtggaatcataacattgacttgcagatagtcaccggctattttttcgacaagatatttttgtggcagaatacttacgctgactgtctgtttgttaccactcttctctttacacgcttgtatactgagaatgacgcacaataagccgatgattgtgtatagttggttgatgcgcatagctattatttgtttgtatgtttgttattcttatttagagcgagtaaagataacatgaattggcgaaaaatgataacaatcgtgattaaaaaccgtgaagtatataaaagaaaaacccggaaaatgttccgggttttctgtaaaatggtcgtatccgactcttattttatttgctctaacaagctttttacggctgcttcgatttgaaggtcgcgtccttcaatagcactggcgggatcattggcaaccttgatatccggttctagttgcatgttttccaagatacgtccttggttatctttcatgcctacttgtggaataccgaatacaactccgttcatcatggtttcccaccatacagctgtcatggtacccggtaccggcataccgattaatttgcctaagcccaattctttgtaggcccatgggaatccgtgtgcgttgctgtagttgccttcgcaaacaagaactgctgacggttttgtccattgtgcaaatgggtcaatgccgatgaattgtccgcgaggtacaaattcagcaaattttttgcctcctaacaagtggagcaaatcttcatgcaaccagcctcctccgttgaaacgggtgtcaatgatgatggctttccggttgcggtagcgacctaataagtctgagtatgtctttcggaagcttgggctgtccatacctgccacgtggatatagccaatctgtccgtttgacagtttgtccaccatatcctggcgctgtttgatccagcgttgatagagcagatcattcaatacacgagcattgataggcttgatgtattcgttccattcttttttgctttctggatcgtagatagtaatcatcgtacgttttccggctttgccttctagaagtgggaaataatcttcaccgctcttgatgggttggttgtctattttgcggataatcatgccggctttcactttgttgccggtgatatcaagcggaccgcgagcgattacttcgctgattttcaaaccgtctttgtcgtatgtcgtatcataaaatgctccaaggttagctgtagctgcacgatttggacgtgctccatatctggctccggtatgtgaagcattcaattctcccaacatttcacctaacaactctgcaaagtcatagtcattattgatgtgcggaaggaagcgttcgtaagcttttttgtaaagcggccagtctacaccttcgaaactagcatcatagaatttatcatttacctgctgccatacgtggttaaacagacttgcacgctcttctgccggtttccattcgaaatcagctttgtagttcatgggttttaactgtccgtttccttgatttacagtaaatacctggccattggataacaaatagagagttctgccgtctttagagagttccagagctcctccgcgtccgatttttgataaaatgcgtgtgctgtgattttcaaaatcgtgtacccataaatcatatcctccttcaaaggcggcgaggtaataaagtttgcttccgtcatgggttaatactgcatcgcctaaatttgaagagttgatagtcatgcgaaccatgcgttcttccaagttttctaaattaagttttaactcaggaattgcaggttgtccgtttttagtgttttgtttgttttgatttgcaggggcagcgttcttgctattctttttgctatctttcttgtcgtccttcttgctgttttttttcttggccttggcagcctctgcagccttggctgctgcttctttctgagcttcttgtgctttcagttctttatccaatgcacgttcttctttgctcatcttgaaatagtcgaaagcctcctcgtccaggaacagtccgtaaatgtcgccttgtgcaccccagcttccgtggctgcgcaatccctgacggtctgtataccagataatagctttaccacccatcatccattttggattggcatcgctgtatccgctgttggtcaagttgtgtatttctcctttgccatcagcttgtaccaaagcgatgtccggatgctgccagccgccttcttcgaagtactgagctaaaatccagcatccgtccggagaccattcgaatgattggtcaccatcttgataagaataattgtattttgcaggtaatacaactcttactttctggtttttcagattcattactctgatttctgttctattggctaaataagcaatttctttaccatcgggagagaatgccggttggaaacatgcctctttacctttcgtgagttgggcttcttcaatttcacgggcataggtgaaggatttgtcttcgttatatttgatgtgcgacatgtagatgttccattgtccgtcacgttctgacgcataagtcaataaacgtccatccggagagaagttgatattgcgttcgcgtgctgctgtattggtgatgcgtcgggttgttccgaattctgtatttgctacaaacacatctccacggataacaaaagcaaattctttgccgttcggggcaattgctacttcgctggcaccattgttccaactcattttatttacagccggaatctgattgtccataacaatattgatagccacttttttcggttgctgttttggactcatggtgtatatttctccatcatagaagaagcaaagcacatcgtcatttgagcggcttaaaaagcgtacaggatgtttggtgaatttagtcacttgtttgatgtcctgtgtattgtccagggccatgcggcatacattgaaagtaccgaaacgttcgctgaggaaatagacagtgttgccgtctgcagccaataccggattgcggtcttccacttgtttgtctgtcagatttttgtattcttttgtcttgaagtcatagctccagatatcccggcaaacagatgaagtatggtgctttctccattcatcttcatatcctttcatgtcgtggtaaaggattttgttgccgtctttggtatagcaaatatcaaaagcgctgaatgttaacaataactcagggcgtcctccttcaactggtacggaatatacctgggctgttgaagatggaaactgaccgaaatctttgtccggtaggatagatgcgttgaaaataacgtttttgccatccggagtgaaggttgtcggaacagcttttcctgaaaaggttgtcagacgggttggtgttccgccggtaaccggtacggtataaaggtccatacctccgtctcgtcctgacgtgaaagcaatggtcttgctgtcaggcgaccataccggatggtaatcgtatgccgtgtgggtggtaagctgtgttgcacgtccgccttcggcatctactaagaaaatgtcacctttgtagcagaatgcaatagtcttcccgtccggtgaaatggcgggatagcgcatccaaagaggattctcctgggctgataagctggtgaaaaccaacaagctggcccatgccaaaaatagtttgattaagttcattttattacatttagtttgtggaatttcgtgcattaaagatactcattttgttgtaatgagttgaaatacaataaaactttaacgtaaaattgagaaaatagaaaacgccttttctactttttaagaaaaggcgttttagctatttcgaccactataggattatttcttgtattttcctaaattgtcaggattgaagttgttgataaagttggcatgtgcagccacttttgcttctccgtagcggatgaagatttctgctgatttcagatacttttcgcatctttgagcatccagcaataacaggtagccgatgatggtatatccggcaatttcgaccagtctgcgtgcgtggaaatctgtatattcactgttgcctacagcatttacggtcgctgttgcagcctccaattgagctgtcatggctttcagtttgtcgcgcagatactcgtgttccggtgcgatagttgatttctcgtacacttcgcggatatgttttgcatactgtccggtagtaacgccacggattgcagccacaacctgcaattgtgaggtaccttcgtaaatgttggtgattcgcgcatcacgcacataacgctggataggatagtctttcatgaaaccggaaccgccatggatttgcaatgcatcataagtgatttcattggcatattcgctggcgaacagtttctggagcggagtgtagatgtctgccagcttctggtattctttcatctcgttgcgctcctctttgtccaaagttctctcttttgaaatgtggtaatatgttttgtacatatctacgaaacgggctgtttcgtacaatacagaacggataccatgcaatttggcttccatgtgtgccagcatttcatatacagccgggaattcaatgatagctttgccaaactgtttacgctcctgtgcgtatttcagaccttcgcggtaagcagcttctgcgataccgacagactgtcctccgatacccagacgggctgcgttcatcagagccatcacatatttgatcaatcccatcttgcgttcaccgaccaattctgccggagcatttttaaataccaattcacaagtaggagagcctttgataccgagcttgttctctgtacggcgcaccgttacggcattgttgttgcggtcatagataaacatagacagaccgcggccgtcgttagttccttcttctgaacgtgccaataccagagaaatatgtccatctccgttggtgatgaaacgtttcactccgttcaaataccattggccttctgcttcgttgtaagtggctttcagctgtacagcctgcaagtcggaacccgcatccggttctgtcagggccattgcgcaggtctctccggcacatacgcgtggcaggtattttgctttctgttcctcgctggcaaattcattgatggtctcggcacagtcctgcaatccccagatattctgtaatccggcatctgcgcgggatacaatctcggcagccatgataaacggggtaatcgggaagttcaaaccattgtatttacggggcaaagagataccattcaatccggcctggttgatgacatcaatattctgctgagtgccggcagcgtattttacgtgtccgtcaatcacctgaggaccttctgcatccactgattctgcatttacagcaactacatcgccgcaaatttctcccacaatttccaacactttgtcataattgtcaattgcgtcttcaaagtcgcgcggtgctccttcatattgttgtgcctccgtatagttgcgttctttcaaggcaacaatcttttccatcagcgaatggccgagatggaattttatatcttcgttatcagtataaaaattagccatagttcaagtgttgattacttactgtttttcttataatactgtatcatcttcggaatcactacattcaaatcgccagtgattacgtagtctgcaaatttgttgataggggcattgctgtccgtgttgatggcaatcaccatggcagattcctccatacctgcagtgtgctggatctgacctgaaataccgcaggcgatatacagtttcggacgtacagtggtaccggtttgtccgatttggcgttcgtgttcgcagaatcctgcatcaacagctgcacgcgaagctcccacttcgccgcccaatacgtctgccagttcatgcaatagctggaagttctcttttgaaccgactccgtaaccgccagcaacgataatcggggcagctttcaaattcaccttggatttctccatgtggcgttcaatcacatgcacgataaaatcttccggagcagtaaatttgtttacgtcaatggctttcacttccccttggtggttggcattgaaaatctcttttttcatcacaccttcacgcacggtagccatctgtggacggcattccgggtttacaatcgtagcaacgatgttaccgccgaaagcagggcggatctgatacagcaggttgttatatactttctcgtttttcttgtcctcgtaatctccgatttccagactggtacagtcggctgtcaaaccgctgtgcagggcagaagatacgcggggacctaaatcacggccaatgctggaagcacccatgaaggcaatttgcggatgttcttgcttgaagagatttaccaggatagaagtatgaggcaaagtagtgtacggatagagacgttcatcgtcacccacccataaaacatccactccgtaagggaacacttgtttttctacgcctttcaaattactgcctaaaacgacagcttccagttttacacccagttcggtggcaagggtacggccttttgtcagcaattccaagctcacgtcggcaacgattccctcttctatttcgcaatatacaaatacgctattcatatcttttatgatttataggcttgtaaaattatcctattgtgtggttgataatcaattctttcatcatggcatcgattgcttcatcgctcggttccagtacttttgcttcttttgcctggaaaacaacgttttcgatattcttcaccttggtcggtgagccgctcagtccaagttcttgaggatcacaggtgatatcgtttacgctccattctgtaattttcagatagggacgttcgttcagcagtgacatatagtcctcgtttacgtcttgtaattcttgtgcagcctttgcatatttgtatttcattacgcggcgtgcgttgcgtggacggcagggggctgcagagccgtttacggttacaacgcaaggaatcggacattccaccacttcaatacctctttccagacggcgcttgatggtcattttgctgtcggtgcattccagaatttcttctgcgtatgtcacttgtggcaatcccaacttttctgccacctgcggacctacctgtgcggtatctccgtcaatagcctggcgtccgcaaatcagcaagtcggcattcagattgcgcagggcacatgccaatgcgtaagacgttgccaatgtatccgaaccggcaaaagcacggtctgataacaaataaccgccgtcagcaccgcggaacatagcttcacggataacttcggcggcgcgtcccggacccatcgtcagaatgtgtactgtggtgccttcaatcttatcttttaatctcaatgcctgttcaagagcattcaagtcttcagggttaaaaatagcaggcaatgctgctctgtttacagttccgtctgctttcattgcatctttccccacatttcttgtgtcgggaacttgcttcgccagaacgacaattttcagtcctttcatatgttataaattaaattacaataagcaattctcaattgcgctttaaagaggtaaaggtactacaaataaataaaaaaacaagtatccgtgaaagcggatacttgtttttgtggtaattgagtgatattttatcttttattgtggcgttttacaaacagggaacgcaaactcggtttctttgcattctcttgtacgcttgcgcttttgcttgacggctcttctatagttgtgtatgaataataatacggggtgcagcaaagagattccaataagcataaaaaaatagactaaatcacccaatccaccgccgaaatagacattcattccttttatgcctccgcaaatggctgccatgaaaaagcattcataagcccaaacgagtaggttcacgattatccatatccgttttgaataccccaaatccgcaccatttttactggtcgtatgaggaagcaactgactaataactaaccaaaagagatataaattgactgctataaataaaataatcaattccataactataggcattctgtcaaaaaacatgtattggcaaggcgcattatctcttgaacatttttctctccattttttgcaactccattgttgcctcaatgtaagggccatctactttgatgagtaaatcttcaaattctttttttgcccggaagagctttacgacatcctcgccttccatgaacagtccgatatattcgtcatccggtttccaaagatacacgggtatgtccttgccctttgataccatcgagtttatcagaatctttttaagttcgtctttacctgtttctgctttctgcagggcaggtttgccatatttctgcctggcagcttctaccagtttctcgaagcctgttttattcatcttcgtttcgcaggccatcgatattaatttgccttgtgcattggttgtcaaattcagttttccaaaatcggtatcacaaaaagttgctttcttggtagcaagactgtccgtacttatataatatattaaaatcggatatttctcagtccgcgaaacatacatgtcttttgtgtatttcacatagcgatagtttactcctttgcgggtcttttggggattatcgaaatcaatatatggagagcaaaaacgttccacatcgatgtcatagtccaggttatccatgttgataatctggttgtctgattgtgcatgggctgttgcgccggataaacataaaaatgctgtcaatccaatgatgataagtgttttaattttcatattcgtttattttataataaatagtcagctcttgtttcttcggatatttaccggtgtatcaccgagattccgcttgcagaaatcagacaggtaagactggttcgcaaatccgcattgttcggcaatctccggtaagggaaggtgtgtagtcctcaatagtttcagcacctgctcggcacgtttttgccgaagccactgggctacaggacagttaaacaatctcaggaatgtccgacggaaggtaacggtactgtttgctccgcatagttccgccagttcttctgctgtcttcgcttcagtatggcattccatcactttctgaatgaaagaatggtcggtatggataccgagcagttcttccgcttgcaaaatgattttacggttgatatgttcgtaggaggcatcgagcagtttgaatgatacctcaatgccttctgccggttcggaagtggaaggcattccgcattgtattctcgcttcgcggaagtagtagagcattctgtgatagatggcttccagatgttcttcacgatgcctttgcagcaatcggcataaggtcagtaactcttctacgcagcaataatgcgtgtaccatatttgcaaacgcatgacatagcgggtggattctgcttcaccggctgtcatgaacagctccagccatctttcaaagtccggctgttcatggcaaattgcttcgggaagcccgttcatccatccggcaatcgtattcatgaattccatgtccgatgcaaagggacgcagttgccgctctcttctctcttccggcatatccttggatatggtcacgcaaagcatacgcagacgtgcttcccggggatcgtccggttgcaggcgtgaaaggaggtaaccgcttattgaaaagcctttgtccatagcagggaaaatttatcggttctcaaacctgagtgccaccgtcatgcggaatgccacgggttctccgttccgggtggcaggtgtgaattcgggaagccgtttgatggcatccaatgctgcgacttccagttcggacgatgtggccttccggttttccaccttggcatccttcgctttgccgtcttttcctaccgtgaacgatacgcttacattcccttttgcatatccctggtttccgaaaccggcattataggccatccaatggcgcacggcaagcctgaaatccgggaatttcgcgaacggtccttccttgaacttgggaagttccccgtccgggatgttcatatatcctttggtggtgtccgggacaaggtcttcctccgtaaacagctcgccggtgtcgtatacgcctgctgccggattgatttccatgctccggacatctgacgagaggtcattgaaattgcaccagttaccgacgctgatgcagtcgatgaacggatcatatttcgtctttgtcaccatcaggcacacttcataccaggtgtgtggctggctgcctccgccgacaattccccgttcccccttttcgttctcttcaaggtaaatcacggcatccttgtgctccggattcggcttgcgtacatatagttggatagtccggtcattcacatgccatccataattccgaagtccgaaatactcttctgtgacaaagcattgggggccgtatttttccgccagggcatatagcagcgaatccactgccgccgctccgtccagccttcccagtgccagaatgccgatcagttttcctgatttgtccgccaccatgccggtatacgggaattcaaagatcccgaagcgggcaagaacctctccgtagtttgtttctatcgagctgtattcataaatgaccgcttttttgccttcccgggtttcgcatttcactttttcctttccgaaatagcgggatgatttgtcataatcctcgtcgtatgtcttcgctttggaataatacttgtccacgttcattccgaacaccacattttccaaatcgtatgcaccctcaccccaatattggggctgtgcggcactgatgccgcaaaagaaactcaagattcccatgataaaaatagttttcatgttttgcaattttttgttaatattgatatactgtattagaaacggctggatgaacctccgcctccggacgagcctcctccgaaactgccgccgcctccgccaccgccggagccgcccgaacggctggaagaggtgctgattttcggtatcgtatagcctaccatgtattcggcatcgcagtacaggcatttgtggcgtgcctccctcagtccctctgacgaagtggtggctttaataatagtccgatatttttcttccttgtgcagtgtcatgtgtccgcaggaggggcagcattcatagccgtccttttcaagcggtatccggattttcacctcttcgctgcaagcggagcaccggtagatgcggatataggcggttttcagctctgtctctttgcgttcgctttcagtcagccgtttcgtatcttttatcaactcgtgcaaaggaatctcccggagggtttcccggttgcatttcgggcatgttcggctgcgcctgagggtcttttgtttctgtatgccgaaataccagcaggcaatacccagcatggcgggccacaccggtaccagccagcacagtccgagcagggtgcgtacagtaaagggttttcgggtcgccagtaaggtcagtgcggcttccgtcccttcgtctttgggcgtcatcctgtgtaccgccgatttccagacaaaccagtttataagtatcagcatcagggcaaacacgataaagaccagggaaggggtggtacgccggaacttttttatccatgcttccggcggcgctgcctgatagtcacttccgtacaggactgccgccaccgccttgacaccttcaagcattcctgtattccagtcatttccccgaagatgcggcaccatggtttccatctgtattcttttgcaaatggcatccggcaatactccttccaggccatacccggtcttgaaggtgatatcccgtatatcccgggtcagcagaatcagcagtccgttgtcatcttccgctttgccgacaccccaccggttgaacagcgtaacggcaaattcatgcggttcctcttctccgatgctgttcaaggcgacaactgccacttctatggtcagggagtcctccagttgttgcaatatatcgttgattttattcttcgtttcactgtccaatatatggtcagggtcggatatccaattgtccgcatcgtatgtcttggggttaggtacatcatcgaccgttccccatgccatcgggcagaaacccaccagaacggctatacagattataagttttcgtatcatatagtgcctcctttctcatgattattcatatcgaccggtctgaaagaacgtctgctgtccttttcatcgtatttttttaatttctcgctgttcatttccaacaggtaaacgacgaatccggaaaatccaagcaggcacatcacactgaaaaataagagcagaagcatccagccccagccgatatcgtcaaacatgggtgaggcaaaccttatgcagataacataggcaaacccaaatgccgcaaccaatattcccaatgccatgatgggaaacagcaggattattgccagtgttttccatatcagtttgcagaatttggggtgacggcctgtggcagcatagccggccaaagagcaaacggtggcagataccagtaccattatcaaacagataaatccagccatcagccattcctcaggagaagcggctgcgagcgaccctctgctctctgcaaagatattggcaaacagtccttcattgatgataagatgccccagactgaacagtacggtggtcagagcaaatacaatcatgaaaataaaacccgctgccagacagcctgacggctctttggagccctgcttccttctccagataatcagtccggttatcagaatctgtagtacaatcaggatatatccttccataggctcggtcagttaaaaatgacgggaagagtagcgacaaaggagattgcttttcccttccattttgccgggacatactttatgccgtaaaggcagtcgcagaccgcttttttcaatagcggatgggggtctccgtatatttttacgttgctggcaacgccgtcggttccgatggttatttccgccgtcattcttcctgtaattccttgctcgactgcctcttccggcttcctgagcaattgtgtcaagattatgttccattcgtccggcattcctgtctgcgggttgatgggcttggctggctggaaatcaggactgaaataatccacttcctccatctcttccggttcggtctgctttttattgtccggtgatttttctgtgcacaaccattcgataagttcgttgcatcgctcgcggttgattattaaccgggatgcttcgctttccgatggggcaaatacggttatctcggcaattttccgtctcttttcgtctggcatgtagagcaacagactatccccctgcaaggctgtcctgtagtgttttcccatcattccggcagcgtctgtatcgtcattttcctctgaagcttcatcttccataaagtgtttcaaggtctcttccaggttgttcaggtcgatgccttcttctttcaaccactcttcaaacgtgattttccttgtactatttttcagaatcttgtccaaatctcctgttgtagatgttgaagaggacggctcgtaccagttcccgtccctgtgataaaggcgcttcatgcctttcagtttgtcgagagtctctgcgtctgcggagatgatgaagccgttgctgtcaaccttttctatggaaaaagtcttgttgccccaagtcacctgcaccggtttgtctccaaaatcctttatgggtactgtgatgcggtcgtatttctcaggcatatagaaagacaaggagatgtgtccgcctgcaatttcctgataagggacagtcagcggtatctgcaatccgaaccatatattcaacatgtctttgttttgggcatagtcgccgccctcaagcagatagatatcttcatccgggtgtatatagaccggtttgccctgtttatccgccagatgaagctgcaaatcagtctccaggtcgaagaaaagttctttgcagaaccccgtgaagttcccgttctcatcttcgtgataatgcttttcccacaggccggagccttgtcgactaccgaagtatgaagatacatcttcgtctttgccccttagcatgaggttgaaaaagataggagaatccttgttcggctctatgaatgctttgtcaaagcatatgaacagtcttgacaggctctttttaaaactctcgtgtttgaatttgtccgcccatttttcccaagggaatctatcccgtttgagctcatggctctctgccaatgaatcaagttcgctgaatgccgttcctgtctcgaactgatagagcgtttcaagttgcttcatggcctcttttttctcttcttctgtcattttcgtcttgttttgtgcccatgctcccagtacgagacatgcaagcaggacggttgataataatcttttcatggtgaatggtgatattgtgttttcattagaataatacaggaataatggcaaccgatgcaacgcattttccgtcatattttgccggcatgaaccgcatgcggtagatgcaatccgttacagtttcgctcaaagccggatgcggcgaacttgtaatttccactttgctgacagcaccatctgcctcaattaccaccgtagccgtcaccttgcccgtaatgttctgcccggcaacttcttgtgggagtgtaagcatctgcgacagttcggcgctcaactcgcttggtctgcctgtatcgatttgtagcggaatggcaggctggaatccgttttcagacaagtctattgtctccgtatctttttcatataaatgccagtcaatggcattgcgtcccttggtcagtgtccgggcatattcgacacccattttcaaatgtccctccagataatccctgaaaccttcaagcacccgctccttgtcaagccgcaatccgctggccgtttgtttttcaggaatatcccactctgcaccggccctgtatatttcaacggcatccattccgctcataaagacataaccgtaaactacgttttgtctgtatgctctgttcaattctgctttgatggctttgttcataagacatatcgagtcgcagtcctgacacagaatcgtatttttaaaacattctgttattgtcatggcactcctcagtccgtcttcaaaagcggccatgatggcaggacggtttcccggggaaaggagcattgcatcaaactcctctctgtgggcttctcctataaaccatttatattccatgatccagccagcctgtacaacgcctacggcatacgaaatcatatcgttaggtgccagcaaggcattccgttcgtcgggtgtaagctttatgttgtttttcagcctgcggatgccgtccggagcggcaggagaatcaaattttgcaattgccgaagccagggcttccggttgggtgaggtcattgcttgctgtggcggtatctatccactctggaagaataagggcatcgtcggcatgctcttggcacaggaaatagggtctgttgtgatttgcgatgtcgtaatagcgttctttctcttcattgaaaaaagaaaaccatttatcagataaggtgtaatagtgccgggatatctcattttcagaagcgatatgcttccttacctgtttcagcacatcggaaattgcggcatcgatataatccagttccggataaggatttgttgagtatgctcccataagggctccgttgcggaagcagatcctttccattccggtactctctgcaatgccccgcaattgtttccggagagaggaatagtcttttagaacgatttctttccaatgctttacgccaaagtcatagccggcgtggatatacggggcgtactctttcctgtaagttttcaccttgacggattttcgggcgagcctatcataggcggtggtatagcataaactgtacacgataggatccagtacatcaattttgtctcccggttgggggaattgtaccttgggtgccgctttcttttcagtcgccatattccataccgtatcctttgtcacctttatatcaggctcctcttcggttatccggttcgtattctgagctccggctgacattaccatgcctgcaaacaaagctatgaatgctagttttttcatatctgcttctgtttttacttgtcgtaaaagtaaatttttaatccatgtattttttatgattgctgataagatttacggatttctgttcaccgatttgaacattcagccatacagagccttgtgtgcatacgttttcataactgaaaattaattttttaccgtccggctcctagtacggattgttggaaaagaaagtgtggagacggttcacttattcgtattagaggttctggtaaacccggaagcaaataaataaaacagtaccccacacctatatcgtatgttggtataacacacaaatacagatgatgaatgtgaccgctttcccttgcttccattgaaatgtaccagatttctaatacaaggtttcagtaaaacactttcatctattatgtctggttgcaatagcaaccgtgcaaatataaataatgttttttaccggagcacatttggggtactgatatttttgacaaaaataatgtagaaaatgcatgaatgtcttacgatttgagaataatttattggattgttggtcggtagattcactttaaatctgtatctctctgtttgcctctattttcctcccgcttaaatggtattccccgttaacttaaaaatatatcaaagataacaatctgttatctttgtcttatagttgtgttatatttgatatatgtttgtgatatatttaagagggaggaatgcgggaggtttgtgggatgggagcaagggaaaggctgcataatctataaaaactttggatttcttgcacgaatggtaattttatttgtatttttacatcatcgtaacggtggttacggtaatggaagttacgatagtgtttgtaaatatgagattttttgatagagaaacagaatttgaaaagcttggagaaacggatatgtagtgaaatcaataatatggtctgttcatgtcactgaaatagaaattccgcaagcggagatgcctatgtgctaactccgtttgcggaacgatgtattatagcaaataaattacttgtctttagttttcttctcttttatagggttgggaaggtcggctgccgcatcacccatctgtgtaaggtatgcatcgtacatgtcaagaatccaggaatcattctcgtccacctgttttttgtgcaattttctgtccggacccttaaaccagtttttgcagaatttctgcaatcctggatatttgtccttcatcaatacagaatttaccaacatgtaagggtatacgattccttccgggtcattgtggaaccggataccgtaataggtctggagggatctgctcatgctgttcactcctgaagcgacccatactttccaccagtaagttgtagcgttctttcccgctttattgacacatagtagcctttgcattgtattgtaacggcttttgaaattaggattggcaagaggacgagattcccaacgcagaccatccggatggttttctgttatctctatatagtctatacaagtcacctcttccgctgtgaacttgatcggatctttgccgtcgggagtttttgaaatcttgaatgaaaaattctcttttttgaacaaagagttctcggcatgccatcctctgcttacatagccttcgactttctctccggacttgagggttacaataacatggttactctcatcctcttcaggttcttgggcacttgctgtctggacgacgcagaaggctgttagggttagtagaaatgataataaatagtgtttcatgacaatatgtgattaaagttgtgttattcgcccgacttatactccatgagcatcagcaccgtattgtcccgttgggttcttgaattcagaatgatatctgccatggtcggatcgtcactgacatatgcggcaatctttttacggaatttgttgttcgccttgccgccgacttttcccaccggtgtgaaatctgcttctccagtctttttcagacagtaggtggtttttgaagaaatcagcccaattcgttgtaagacctggataccgccatttgtatctatgccgtaacctttggtggaataaaccccgacgctgatctgtggtgtttcgacatatatccacagccagccaaggctttctgacggaacgaacttgcggacgtgttcaggtgtggccggatgccagacaacgatggaatcaatctgggcggcattgaagttctctctgacttcttcttttctgtatgcgttccggaggaatactgtcttgcccgagcgtttgggaagtttaatcctgtcattttcagaacattcgatgacagagccgttttttaaatagatgcggcctattacgaaagatgctgcatttgccgctgatacgattgatagaaacaagaatatcagcaatatggtcttggttgcattatgtttcataaacatgaataactttatacacaaaaatatcaaatatattccagacaacaaagcaattatgctattattttatgaaataataaaagaaaaccgcccgatagccatggctgccgggcggttcaattgtgatgaaagaatttttattgtttgtttgtagctttcagtgcgaattcacgtccggcacgcaaacctttcaagttcatttcaacaacctcttctcccttgcgggcaaagatggcacggataccgtcctcgagatattcaaaaggaatttcgatgaatggagaagcggctcccaacataacgaagttgctggcacgtacgttgccggtcgcttctttggcaatggtatcggcatcaatcactacatggtggggaagtgctgccaaggttgctgacaatacttctgtatccgggtagttggggatgttgataaacggtgtggcattggtcactacatagccgcctttacgcaggtacggaagataacggagtgcttccatcggttctactgatagaatgatgtctgctgtgcctttggctatcaggtcggaataaatcggtttgtctgaaatacgcatgtacgattgtacatcaccaccacgctggctcattccgtgagtctcggcctgtttcatgtataggttgttggtcagtgctgctgaacccagggcagctgcgatggacaggattccctgtccgcctacgcctgctaatattatgtctgttttcatacaatttgtcttgataatgagaaattattttttcttttttgcgtctctggtagctttctggatacatacacgacgcggaatgatgacagatactcctttgtattccaattcagtgcggataatctgacacaattcttcatggtttttcggtacaggaagcagtacacggatgtgttccggttctacaccgatacctctacagatggattcaatcttgcctaatgctgatgattcctgaccgccggtcattgaaatggattcgttatcggaaatgatgacggtgataggagtcttttcgtttacagcatccaacagaccggtcattccggagtgggtgaaggttgagtcgccaatcactgctacggttgggaataagccggcatcgcaagctcctttggccatggtgatggatgcacccatgtcaacacaactgttgatggcctggaatggaggaagtgcacctaaggtgtagcaacctatatctgagaatacacgaccttcgccataagtggcaattacttcgttcaatgctttgtatacgtctctgtggctacagccgttgcacaatgctggtggacggggagcaacgatttctggtaccggtgcgccttctgttgtcggcaagcaaagagctttggctactaagtccggattcaattcgccatcgcgtgggaggctgccgtccagacgtcccaggatgttttcattgcccggatagcctttcagcatgttttcaaccattggatagccctcttccaataccatgatttgtttacattcgcgcatcaggcgtttgatcattttgcgaggtaatggatattggcttacttttacaaccggatatttgcatttgccatcgaagttttccattaagtagttgtagccgataccgcaagctacgatacccaatgatttgtcttctccatcaatgtattggttgaacggtgattgttctgaagcttttacgaaatctgcctgtttttcaagcaacagtctgtagcgtttgcgggcaatggctggcaacaggacgaactgacgcttgtcttcgggcaggtgaagatggttttctgccaatccttcgcatggttctactcctgagcgggagtgtgccaaacgggtggtgatacgcatcaatacggggctgcccactgtttctgacagggcaaaaccatagcgggtcatgtcgtatgcttcctgctggttggacggttccagaattggaactaatgcaaatctaccatattctcgggaatcctgttcgttctgtgaagagtgcatggaagggtcgtccgctgctgtgatgaccagacctccgttggctcccgttacggctgcattcatgaagcagtctgctgctacgttcatacctacgtgtttcatacataccagggcgcgtttgccggcgtatgacattccgagtgctgattccatagctgttttttcgttagctgcccaagcacggtgtacattgcgtgcgatggcttctttggaaccctggatatactcggtgatttctgttgaaggagttcccggatatgcatatactccggagataccgctgtcgattgctccttgggcaatcgcttcaacacctaataatagctgtctttgcataattttgttcagttttattgattttagtgtcaaatttcaagaagtgaatatggggtaattagaggccccagtggaattttagtgacctcattatgtatgctaatacaaaataatattcgctcggacaatacataatgtatagtatttgtgttaaaacgtttgcgaagatagggatattctttgaataatgcaagaaccggacaaaatattcatagctcccaaatattccaatttttttctgcctgtccgagtagcatggcatagccattgcacgtatgggctcctgctttttctcctttttgcataaaggttgtaatagaaggattgtagaccaggtcaaaaagataatgttccggtgtcagtagctcataggggatggggggacaactttgtatgtccgggtatgtgcctaatggggtggtattcacgatgaggcgatgggtggaaaggtggttggcaatatcagcataaccgatttgtcccggcttttgaggggtacgggatacggtgaggggggtgatgccgagagtctggagggcataacgtatggctttggctgctccgccgttgcccagaacgagggcttggttgattcctgtaggaataaaggctgtcagggcattccgaaagccttccatgtcggtgttgtagcctgtcaggtaggggcgtccgtttcggtattcgacggaaacgcagttgacggctccaatggcttgtgcctcttcgctgatatagtccaggtagggtagtatgttttctttgtgggggatggtgacgttgaaaccgcgcagatttgggatttgccccagaagatggggcaaatctgttatgtctgctatttcaaatgtccggtattctgcttcgatggattctcgagcaaaccgtccgttgtaatatgcgggagaataggtgtgggtgagcggataacccagtataccgaatgttttcatggtgttatgctcgtttgtcactcattttgcggccgagagtctcgattccccaaatgagaaggaaaccggctatgcacatgaggattgcttgccatagcaatgggtcgctaccggtcagttcgccgaaatgtaccggtgaaatattgctttctatcaaggctttttccactccgtggctgtctgtgtaggtctggagtgtctctttccaaggccacaccttgttcagggaacctaccataaagccggtcaatagggatacggtggcagtatgatggtgtttgagcagccatgacaataagtgggaaaaactggtaatccctgctacggctcctactgcaaaaagcaacagtacgccgatgttgaaggcgctgactgctcctaatatgtaggtgtatttacccatgagcagcaggatgaatgctcctgaaataccgggcagtatcattgcacagatggcaatggctcctgaaaggatgatgaaccaccagctgtccggggtttctgaaggtgtcatcacggtaatcccataggctatgatggctcccaaaatgagcgatatgaccgtgaagatgttccatttttttatctctttggctaccagtacagatgaagcaatgataagcccgaaaaagaacgaccatatatatataggatggttttccaataaccaggtcatcagtttcgctagagagaatatggaaatgcctattcctgctatgactgaaatgaggaaattgccattgatttttttccagaattccgccagcttgaactttaacagcaatttgacagcttgcaggtcgacagccttgatggagtctatcaattcttcgtaaataccggtaatgaaagcgatggtgccaccggaaactccaggcacaacgtctgcagctcccatggcgcatcctcgcaatattaataaagggtagtttcttttactcatcgtcttattacatttctgtgttcaaaacggaaaaggtcgaaaacggtcttcaccggcgtaaaggtggataaaggcacctctacaaagacggtaatccagttggccatggctccgttccataagccgggcaattcttgtactttgatatctttgcccttgtatgacttggcggtgataaagccttggtcttcgtcaatgaatttttcaaggttgaatttttgacctttatagtttttcgtggcacatacaatgtcgacaggattgaaatgggtcgattgctcaaatatttctttttgtcctttgtcttgcatgttgatttgtgccgattctacaatcatcaggcgtgaacttccgtcttttgcctttacccagaaaggtccgcctccgggctctccttcgttctttaccattccgcatacacgtatcggacggtctaaaaggcttttcaggtgttcgatgcgttctgtctggttttggaatgttttgccttctgcctctttgtagccgacagatgtcaggtagctttcgatttccaacagttgctcttctgacggtgtgccattcaggatggccaggaagtcgaatactttctgttgtacatcaagcagtatgccggccagtatctttttgtattttacggtatcgttcttggcacggtcggggattacattgtctatgtttttgatgaaaatgatgtctgcatccagttcgtttagattgtggatgagggcgccgtgacctcccggacggaagacaatctgtccctcttcatcacgtagcagatttccttctgaatcgatactgaccgtgtcggttgaaggcttctggatagagaaactgacatcatattttacaccgaacatcttttcaaagactttagtcacttttttcagacgagcctggaacaagttctgatattcttcggatacggtgaaatgaagccgggctgttttgttggcgctggcatacatggcagcttcgacaatgtgttcgtcaaatgccgtgcgcacgaaatcacggtagatatgaaaatcgatcagccctttgggggtgttgccatagttgagcccttttttggaaaggatgtatttcaatatttcgttgaaatcccgcttttctatcattttgttgatgtccttgccgtctttccacatgacattggctaggtgttcgtaaaaaggaagttcgtccagtttctcaaagaaatagtgcatgcttcccggctctttgtgttgaacaaaatcaagaaactcttcggtggtgccgtgatagttgtccataaatgcaaagaggtctttgaacatacgggtggcagacccggaggctggcaccattttgatgatgtcggtattttcgcgggcttggtcgtaagtctctatcaggtgttcttcttcttccggtgaggtgtggatgattccgttgtctgtagtggtcggttcggagaggtttatataatcaaagcctttttggaaatttgccagctggcggtcaatggcttctgctttgatgcctctgtgctcaaaattatgaaggtcttcttctgtataggtcattgtctcatttttttagattgtaaatcttcttcgtcttcttcttcatcgtatacatcctcctggttgtccagctcgttttcataaaattcttcggcttcctccattagggtgtcgatgtcgtcttgactgagtggttcttcgtcaatccagtaaattttctgattactgtagaaaccgtccagatcgcattgaataatacagcgtgggttttctgtgtgtacgacgtaaactaagtcgagtgcctcctgtgaattgtcggcgataaggaatttaggtaacatgtttttttaatgtttaaatttcaaggttataagggcaaaggtagaaaaaagagatgaaataatacttgctttcttgtaaaataaaaatggattcttttttttgatattttataggtttctctctttgtcggaatggttgttgattctctctttcagatccttttcttttttctgtatgatgttgataaaagaggagctgatgatacctgtcggaatggctaccatggccactcctaccagacaaatgatgccacttagcagtttgcctaaaggggtgatggggtagatgtctccataaccaaccgtggtgaaggtgataatggcccaccagataccgtcaccgatgttttcaaatacttcgggttgggcgtttctttctatataatagatgagaatggcggaaaaacagatgacgatgaagctggctgtataggctgttgtcagttcttctttgacggcggagagagcctgacctattattcggaaggatcgggagtgacggatgagtttgaatatgatgaaaatgtagggtagaataatgatgtgtacgatttcagtgtcccaatagatataggtgagtacacaaggcaggatggctacaaaatcaacgaatccgtagaatgaaaaaatgtatttcaaacgtgcccgggttgctgtttttttatgataaagggccggtgctgacaggatgcgtataaagtattctacgagaaagataaaagaggagacgtaggttattccaaagagcggaaggtggtatttctccaattctgcaaaagagcttgctatgatggctgaaatggaaatgagaatgaaaaacagggcaaaatagtggatgattcttttccccagtaggcgttgtatcagcagatatagtctcatgttttggttttcgtttgatggatacgacttgcgtgcaaagataattttctttttcatattatatctgaatactgtgtgtgatatttgaatttgttatttatatttgcgcaacttcaaatagttaggtctatgatgaaagtcgctatttacggaaagaatattggagaggaatatttgccggctttgcagaatctggtggcatgtctgaggaaacatgatgttaaggtggtgtgtgaggtcggttttgcgtctttgttgcagacgcgtttcggatatgctcccggttttgaggatttattcgggaaaagtgttttgcctgcggacgaggtaggtatgttgttgagctttggaggagacggcacatttttggattcggtggaatatatccgtgacagcggtgtgcctgtgttgggggtgaatagcggacgtctgggttttttggctaatgtacgtgcggatgaaattgacagggcagtggagtgtattgtccggggacagtatgagttggagcagcgtgagatgttgcagttgaatgtagacggcagggagatgcagggttttgattatgcgttgaatgaggtgggtgtacagaaggaggctacagcttcgttgctgaatattcatgcatatatcggtgatgtctttttgacaacctattgggctgacggtttggtggtggcaacacctacaggttcgacggcttattccatgagtggtggcggtccgattgtgagtcctgagtgtcataatatcatccttacgccgatttgtcctcataatttaagtatgcgtccgttggtggtgccagctgatgctgagatttggctgaaagtggagagcaggtccgggaattttattctgagtacggattcgcgtatccgtccgatggaggattcttgtcgtctgacaatccgacgtagcgacagaaaattgaatgtcgtgaatttgccgggacataattattatgagactttgaggagaaaattgaagtggggagaagatgaaaggaatgaaaaatggcggggttgtcgtgaataatcgtgattttgtttttatctttgggcgttttttgtgaaaataacagattctatgagtgatatacagaaagagattgttgctgcgggactgccggaacatgtggctattattatggatggtaatggccgttgggcgcaagaacgtggcttggatcgggtctatggtcacaaggctggtgttgatgcagtgaagagagtggtggaggctgccggggaaattgggttgaaatatttgacattgtacaccttttcaatagaaaattggaatcggccgaaggctgaagttgatgcgttgatggggttgatggtggatgccattattcgggaaacaccggatttgatgcggcagaacgtgcgcattcaggtgatcggacatacaacggatttgccggagatggtgtggaaaaaaatggaaggattgattcagcagacggctggaaataccggtgtgactttgattttggctttgagctatggtgcccgttgggagattttggaggcagcaaaaaaaatggcagaagattataagaatggaaagattgcagatttagaaagtgttggagataattgttttgccaattatctgactacggcaggaattcctgatcctgatttattggtgcggaccagcggagaatgccggttaagtaatttccttctttggcagtgtgcttatactgaattttattttctcgctaaattttggcctgattttgaaaaagatgatttatatttggcaatccgtaattttcaaaaacgtgaacggcgttttggcatgacgggtgagcaagtaagtaaaaaatgatatatgattggtaaagtaattcttggtatactgataattttttttgctgtaggaaaggtcgttgcgcagaattcaggttcgacagaccatccggaagtgttttattcaagtcctaaaacctatgtgattggtggaatcgaagtgaccggattgggcgaccagtatgatccgggtacgttgattcagttggccggtttgcagtttggtagtgaaattaaaatccctggagatgctattacaaaagcaattaagcgtctgtattcccaggggttgttttcggatgttacgatttctgtcgaccgagtggaggggaataaggtgttcttgattatgaatctgactgagcggcataagttatcgggtatcaactatatcggtattaaaaagtcggaggagactaaaattaaggagaaaatcaatccgctgccgggtactcaggtgaccgacaatatgatttccaatttgaaacatattattgagaagtactttaaggagaaggggtattataatatggatgtgaaggtgttgcagcgggatgatcctaatgctccgaatttcgtgatattggatgtgtcggtggagagaaagagtaaaatcaaaatcagtgaggtggtgattaccggtaatgaagaggtgaaagaccgcaaactgaaaggggcgatgaagaaaacgaaagaaaagagcttggctaatttctttaagtcgtcgaaatatattgagaccaattacgaagacgacaaatataatttgttggataagtataatgaattgggataccgtgatgcctctattattgcggacagtgtggtgcaggtttcgccaaatcgggtgaaagtgtacatcgatgtagaggaggggaataagtatttctataataatatcacctgggtgggaaatacggtggtggattccgacaagttgtcccgtcttttgaatatcagcaagggagatacttataataaaaagtacttcgaagagcgtttgagagaggatgaagatgctgtagccaattacttctatttgaatcaaggctatctgttctttcaagcaatgccgattgaaacggtggtcggtaaggactcgatcaatgtggaaattcgtttgttggaaggtccgcaggcaacgatagaccgtgtaattattaaaggtaatgacagaacgcacgaacatgtaattcgtcgtgaactttatacctatcccggtgaattgttcagccgtgaagatatcatccgaagtgtacgtgagttggctaacctgggacatttcgacccggaaaagattgttccgaatccggtgaatccgaatcaggaagcgggaacggtggatatcgaatataatctggtggaaaaagctaatgataaaatagaaatttccggaggttggggtgccggtatgattatcggttctatcggtttgacctttaccaacttctctatgcgtaatatctttaattgggaaacatatcgtccgttgccacagggagatggtcagatgttgagcttgaaggcgcagaccaatggtaagtattatacttcattcagtgtttctttccgcgaaccgtggttgggcggtaaaaagccaaactctttgagtgtgtcggcatattattctcatcagacaggttattccagcaactattataagtcttatttggtgggtaattcactgaaaggtagtgaaatacatgacgaaagtcagcgtatgtcaacgttcggtttcagtgccggtttgggacggcgtattaaatggccggatgactattttaccatgtatacagaggtgtcttatcaacgttatatgttgaaaaactgggcatattatatcatccaggacggaagttcaaacaacttgtcatttgccgtacaattgcgtcgtagttctattgacaatccgttgtatacccgtcgcggttcagactttactttgggtttgacctttacacctccttactcttggtttacaagcaaggattattcaagtcctaatatcaaggatagagataaataccgttggattgagttccacaaatggaaattccagggcaaggtgtttatgccgctcgatagaaatgaaaaactggtgttgtatgccggagctcagtatggttatctgggacatttcgacaagcataagcgttctccgtttgaaggatatgagatgggtggtgacggtatgtccggatatagtttgtatggacgtgagtatgtcggtttgagaggatatgagaatggtgcgttgaccaatgcaggatccagcttcctggctccgaattcttcggatgcaagtctgtattctaagttgaccatggaagtgcgttatccgatttcattggctcagtcggctacaatttatgcattggcattcctggaagccggtaactcttggtatgagttgaaggattttgaaccgttcaacctttaccgttctgccggtgtcggtttgcgtgtgttcttgccgatgttcggtctgttgggtatcgactggggatatggattcgacaaagtgcccggacgtgacggagctgcaggctcacaaatccactttgtattgggccaggaattttaatgaaatccttggttagtggatttattttactatttttgtgacacgatgattattgaaatagaaataaaaaccagaaagtatgaagaatatgattaaattagtagcggttgtcgcatttttattaaccgcaatgggtgtctctgcacaggtgaaattgggacacattgaaactcagaaattgattcaggcaatgccggaaatggcttctgcccgcaagacaatggagacaaaacaggctgagatagaaaaagaattgacaaatatgcaggagcagtttaaggtgaagttggacgaatattctaaaaacggaaaaaccatgtctgacgttatccgcgcttctaaagaacaggaattgcaggaactgcagcagagaatccagagcttccagcagattgcaatggataatttggaaaaaacacaggcagaattgatgcagccgattatggataaagccttgaatgcaatcaaggctgtgggtaaagagaatggttttacctatatctttgatatgagtcagggaggtattcttttcaatgcagacaatacagaagatgtacttcctttggtaaagaaaaaattgggtctgcaataagatttatcaacgatatggaggccgccttttaggcggctttttttacttttatacgttatgaagcagggagaatgtatcggtgtgtttgattccggttacggtggtctcacgattttaaaagagatcatccgggagttgccacaatatgattatatttatctgggggataatgccagagctccttatggctcccgctcgtttgaggctgtatatcattatacaggagaggctgtgagaaagttatttgagatgggatgccgtctggtgattctggcttgcaatacggcttctgcaaaagctttgagaacaatacagcaagtggacttgccgttgatagatgcacacaaaagggtgttgggcgtgattcggccgagtgtggaggcgttggctgactattcggaaaacggacacatcggcatattggccacacgcggtacggtggcttccggctcatatccgatagaaatagagaaattgtttggaaaggagaaattccatatcacacaattggcttgtccgatgtgggtgccgttggttgaaaacaatgagttgtccggtgaaggtgcgaagtattttgttcggaaatatttgaacgaactgtttattgcagatccgcttttggacacgattgttttggcctgtacgcattatccgttgctgcgtcctttgattcaacagatggtgccagagcatgtgcggattatcggacaggggcatatcgttgctgatagtttgaaagattacctgttgcggcatccggagatggaaacttgtctgtcgaaaggagaaagtgtaagttactatactacagataaggcagaaatatttgaacggacgggcggagtttttatgggagaaaaaattatctgccgacacgtgcaaatatgttaagataatatggttgataataaaattttattatctttggactaagtaaaatctctagtatgacagaacaagaacagataagagatgcttttgaagatttgttgaagtctttaagaaaagatacgataaaggaggatatccaaaagataaaagaagcttttgagtttgctaatgaggcacataagggagtgcggagaaggtcaggagagccttatatcatgcatccgttggcagtggctaaaattgctacaaaggaaattggtttgggtaccacttcggtgatttctgcattgttgcacgatgtggtggaagatacggattacacggtggaggatatttccaatctgtttggccctaaagtggcctccattgtggatgggttgactaagatcagcggtgtgatgggttcggaaaccagtcaacaggcggagagtttccgtaagatgattttgacgctggcagatgacgtgcgggtgattttgattaagattgccgaccgtctgcataatatgaggactttggcttctatgccggagcacaagcaggtgaagattgccagtgaaacgctttatatttatgctccgctggctcaccgtatgggattgcatgccatcaaaaccgaattggaagatttgagtatgaagtatgagcatcccgaagagtatcaggtgattgctaaaaaaatcgaggcttataagaatcagttttctgctttgtttgaggagtttatcaagcctatacgtcaaaaattggctgataatacctatgaatatgccattactgcccgtacaaagagcgtttattcggtgtggctgaaaatgcagagacgcaatatcagttttgacgagatatatgatttgctggcagtgcgtattgtctttaaaccaaaagagggagtgcctgaaaaatggcagtgctggaatatctattctttgattacggatatttatagtccgaaaccggaacgtatacgagattgggtgagtgtgccgaaagcgaatgggtatgaagctttgcatttgactgtaatggggccggaaggacaatggtttgaagtgcagatccgttcggagagaatggatgaggtggctgaaaaaggtttggcagcccattggaaatataaaggggagggtgaaagttctgaattggataaatggctggcaggaatcaaggaaattttggaccagccggatgctacggccttggagtttttggatgagtttaaattgaatctttttacaaaggagatccgggtgtttaccccgaaagggtatatgcgcactttgcctaaaggcgctacggcactggattttgcctatgacattcatacggaaattggtaatacttgtattggagctaaggtaaatcacaagttggtgccgatgagccacaaattagccagcggagatcaggttgaaatattgaccagcgacaaacagaaaccacagaaggagtggttggattttgtcgtaacagccaaagccaggacgcacattaatgcaacttttaagaaagaaaagaaggagttggtacgctatggtatcaatacgtatgaagaggtggtcaaaaaattgggattgccgccaacttccgaaactctgaacaaggctttgttgcattatgggcttaataaccgggatgatttatatgtggaaatcggtaaacggatgattgccccggaagatctggaaaaggcattgaaaaagcgtcccgaaaataagtttatcaagtactggaatcttcaattcttgtggaatggcaaagattccgaggggaagaaaaagggaggacaggaacaaggtatcgacctgaattctgattttacgattgctccttgctgcaatcctatcccgggagatgatgtggtgggtatgaacattgccggaacgaaggtgacggtacataagcgttcatgtccggaggcgattcgcctgatggccagtttcggtgataaaattgtacctgtcaaatgggtgagccacaaattgatgtctttcttggctgtgattaaaattacaggtatcgatactccgggaattgtcagtgaggtgaccggactgattgccaaagaggagaaggtaaatatgcggatgatacatgtggaagcccgtgatggaatttttgagggaatgattcatctgtatgtccataatactgaagatttgggacggattgtgtcgcagatagctacgattaagggagtagaaactgtgttgcgtgtagaatctgatgataaatgataatagatagggcgattattttgatatggatgagataaaggagacggttaaagagctatttacagcttatttgcaggaaaaaggacatcggaaaacaccggaaagatatgctattttagatgaaatatattcgcattcaggacatttcgatatagagtctctctatatgtttatgaagaacaagaattatcgggtgagccgtgcaacgctttataatacgattgatttgttgctggattgtaaattggtgatcaaacaccagtttggcaataatattgctcagtttgaaaaagcgtttaacaatgagcatcacgaacacctgatttgtcaaaaatgcgggagagtggaagagttttctgatccccgtatagacgaggttgtagcgcaaatgcaggaaagacatcaatttattgtgcaccaccatttgctgtatgtctacggaatatgcaaatcttgtgcagaagaagttgatggaagttgttgattaattgaggaaatttggctacttttgtgcgtttgagttcaaaagtattaaatgattgaacattagctttataatatttataaacaatttagatgatgaaagttgacgtattgcttggattacaatggggagatgagggaaaaggaaaagtggtggatgtattgacacccaactatgatgttgtaactcgtttccagggaggaccgaatgccggtcatacattggaatttgagggacagaagtatgtacttcgctcaattccttcaggtattttccagggcggtaaaatgaatattatcggtaatggtgtcgttttagaccctatattgttccggcaagaagctgaggctttggctgcaagcggacatgatttgacaaaacaattgtgtatctctaaaaaagcacatttgattatgcctacgcatcgtattttggatgccgcatatgaagcagccaagggagatgccaaggtgggtacaaccggtaagggtatcggaccgacttatactgacaaggtgagcagaaacggtttgagagtgggagacttgttgcacaattttgacgaaaaatatgcaatcgccaaaggaaaacacgaagtgattctgaagggattgaattatgaatatgatgttactgctttggaaaaagagtggtttgaggcattggagtatctgaagcaatttaaactgattgacagtgaacatgtaattaataatttgctgaaagaagggaaaagcgttttggcggaaggtgcacaaggtacgatgttggatgttgatttcggatcttatccttttgtgacttcttctaataccatctgtgcaggtgcttgtactggtttgggtattgcgccccgtacaatcggtgatgtatatggtatttttaaagcatattgtacacgtgtcggtgcaggaccattccctactgagctgtttgatgaaaccggagacagattgggacagttgggacatgaattcggtgcagtgaccggacgaaaacgtcgctgtgggtggatagaccttgtggctttgaaatatgccattatggtcaatggtgtgacaaagttgattatgatgaagagtgatgtgctggacacttttgatacggtgaaggcttgtgtggcttacaaaatcaatgggcaggaaaccgaggaatttccgtttgacatctgtgaagaggttgaaccggtgtatgttgaattaccgggatggaagaccgatatgacgcagatgacttcggaagatgagttcccggaagagtttaatgcttatatcaatttcctggaagaggaattaggggtacctattaagattgtttctgtcggtccggatagagagcagactattattcgcaatgaagaagaataataaagggagcctatgggctccttttttattatgatatatatgtttaatcccttttttatgctgcaagcttttattactctgccgttgacgaatcctgtgttgatttttgcggtgatactttttattatattgttggctccggtggttttgcaccgtttgagaattcccgatttgataggattgattttagcaggagccttgataggaccgaatggtctgggaattatgctgagagacagtagtatcgagttgtttgggacggttggcctgttatatatcatgtttatagcaggtttggagatcgatatggcagatttgcggaagaattatggaaaaactttgacattcggtgcttatacattcttaatacccatgattgtcggtactttgacaagtgtctattttttgaatttttcatggccgacttctattttgcttgccagtatgtatgcttctcatacgctgattacttatccgattgtcagtaaatatgggataacacggaatagagtggtcagtatagcgattggcggtactgtaatcacttgtatcttggctttattggtattggccgttattgtgggaatgtcggtcggtgaaatcaatgaaactttctggataaaattggggttgtctagtattgcttttacagcggttgttttgattgtatttccaattgtcggacgtgctttttttaagcgttatgatgattctgtcgggcagtatatttttgttttggcattggtgtttctggcttcttttttggcagaagctgccggtttggaggctattatcggggctttcctggccggattggcattgaataaactgataccgaatacatcggcattgatgaatcggattgattttgtaggcaatgcgattttcattcctatttttctaatcggagtgggaatgttggtaaatgtcaagactttcactgcaggatggaatgccctgttggtggcaggtatgatgtgtgtggtggctactctgacaaaatatgccgctgcatggttgaccgagaagaattttaagttgacccgcgatgagggtagtctgctgttcggtttgagtaatgcacaggcagctgcgacattggcggctgtattgataggttataaggtggtgttggggacagatgccgatgggaatctgattcgtttattgaatgaagatgtattgaacgggactatcatcatgatattggtgacatgtacaattgcatcgtttgtcacacaaagggctgctcagaatattgcgattgctgaggtaagcggcagtgcatctacagataatgatgctgaagaagaacggatattaattccattgagcaatgaagagaatgttggagagctgataacgttgggtgctgctatcaagtcgcgcaggaataaagcccgcatgacagctgtcagtatcattaaatcggaaaataatgatccggcggcttccaaacgttcggaattgttgttggaaaaggctgttaaagtggctgctgcaacagatcagcatatcagtaccgtattgcgctatgatttgaatattgtgaatgggatacggaatgtggctaaggagaataaaattacagatattgtattgggattgcgtacgggtaagtatatatccgatgagtttttaggtaaattgacagaggaggtgctggctaaatgtgcgacaacgactatcgcttacagacctatgcagccgattgcaacggtaaaacgttgcattgttgtgattcctgaagaggcagaaaaggaagtcgggtttccatattggttgctgagtatttggaatataggtaaaaatttggggatgaaattcatattctatggacatcaggatgtcttggatattttgaaaatggtgaatgccaaacatacgattgatgttgagtgtagagagtttacagattgggataatttttcagaggtggcgaacgccgtgcaggataatgatgcgttggctttggtgatgagccgtccaggattcccatcctattcgcggcatatggaatatgttccgacttatattaataaatatttcaacacggtaaactgtatgctaatctatcctatgcagatgggtgtaggtgatgattctacgacattccatagtatttcaatgataaatcgagtagagagtatggagggattggtgcaggtgttgggtaaattatttaagaaaaataaatagtaaaatgagtatatacctatttttaggtattacagtagcggtgtagattctttatctttgtgggcaaatatgaggaataatggataacagttatttgaaactttcagatatagcaacgggagaagagtgtgtgattatcaaagtgcatgggcatggtagctttcgcaacagaatcgtggagatggggtttgtgaagggcgaaaaagttttggtgattaaaaatgcccctttgcacgacccgatagaatataaattgatggacagccatatttctttaagaagaagtgaggcttctctgattgaagtggtgcgcatttccagtgaaatgcatgaagggtttaatggtacatttacagaagatgatattgcccgggaggtgcatgagagatcacgaacgatcaatatcgctttagtaggaaatcccaattgtggaaaaacttctttgttcaatcgcgcaaccggaatgcgagagaaggtgggaaattacagtggtgtcaccgttgatgcgaaacagggtgttttgcatcataaaggttatacgataaatctgattgatttgccaggaacttattctttgacagaatattctgctgaagaagtgtatgtccgggagtatattaccaagcatcatccggacttggtgttgaatgtagtggatgcttctaatttggagcggaatctttttttgacaactcagttgattgatatgaatattcgtgtcgtgatggcattgaatatgtatgatgagttgcttgcaggtggagccaaattgaattatacttacctgggacaactgatggggattcctattattccgaccacagcatctcggggaatcggtattggtgaggtgttggataagattatagaggtgtttgaggataaggcgaaagaatctcgccatgtgcatattaattatggaccggaaattgaagatgcaattagccggataaaagcagttgttgtatcgaataaaaatattacggacatgtatgttccgaggtatgtgtccataaaattgcttgagaatgacagtatcatgcaggagcaattgcatgcggtaccaaattatgagcagattatggccgtggcagagaaagagatcggacaattggaaaaagagtataaagaagataccaaaacggttattacgaatgctaaatatgggtttatccgtggggcattgcaggaaacctataatccgggcgagaaagataaacggcagttgacaaatgctattgacgctttgcttactcatcaatggctgggttttccgtttttaatattttttatgtggctgacatttcaagcaaccttttctttgggaaattatcctatggattggattgacatgggggtggctgctttgggagaatgggttgccggaatattgcctgaaggacctttaaatgatttgtttgtgaatggtatcatcgccggggtggggggagtaattgtctttttgcctaatattttgattcttttcttttttatttctttgatggaggataccggatatatggcaagagcagcctttattatggatagactgatgcataagattggtttgcacggaaagtcatttattcctttgcttattggatttggctgtaatgtgccggcgataatggcaactcgtacgttggaaagtaaacgagatcgtattatcacgatgttaataactccttttatgtcgtgcagtgcccgcttgccggtgtatattttattggttgctgcattttttcccaagaaccagggattggttttgatgtctatttatttcatcggtatcgttgtggctgttttgactgctttgctgatgaaaaagactctttttaaaaattcatccgtaccctttgtcatggagttgcctccttatcggatgcctacgatgcggaatattttgattcatatgtgggaaaaggccgggcaatatttgcgtaaaatgggtaccattatattaatggcttccatattgatttgggctttgggctatttcccgctgaatcgggatgcagaagttggttcttccgaacatttggagcagtcgtatattggcaaaatgggacgttttatcgagccaggactggagccattgggttttgattggaaaatgggtgtcagtatcgtaaccggtttggcagcaaaggaaattgtcgttagttcaatggggatattgtatcatgtgccggatgcagaagaaaatacccaaggtttggcagaaagcctgaagagtcaggtggattgtgaagggaatcatatctttaatccgttggtggcttatggctttatgctgtttattttgatatattttccttgtatggccgtgatcgctgccataaagaaagaggccggctggaaatgggcattgtttacgatattctatacgaccggtttggcatggattgttgctttttgtgtttatcaaatcgggagtatgttttaagctatggtgcagaagattcttgtatatattattattggaattgctgttgtcggagctttgcgcttttgttacagaaaattgaaagccttgaggaggaataaaacatgtgcaggatgtcattcatgccctttgaaaggtaggtgtacaatagaaaaaaataatagctcctgttgtcattgacatcgggagctatttattttagaatagtttcaaggtgattttttccgcttctttccggcgtcggattctatctttttctcctttccggaagacatagaccaagccgtattcttcacacagcctccgtttttcttcttcatcagggatgttttcaaagtgatgttcgatttcattccataattcaaggataagtgcatcggcttcttttctgtattgagctacattataactctcccgtgctgtgttggtctgaaattgtttttgtcgggtgtaatgttctttgaagttttcaaagtttactcgaacaacagcgatggtaggattgtatattgtgttaccatcccgtttgagagcgcgctcttggtcgcctttgatgattttttctccccattccaataaatcttgttctgtcagtaggggtgggacttttgagcttttttcatccagaccgtaataagttctgacagatggtttcatttctcccctggcaatgcagaaattcaaaacttgaataaagtgcgagatatataatcgtgcttttttggcatattcggaaaattttggactattgccgaattgtttttcttttgccagattggaggtctgtatagcaacctcgaatttgggtaaaaaaaattcaatcttttgttttaaagcaaaagaataggcgattgtatctatttcaaggtcttgtcctttggtcaaagctccttttaaggctctaattcttgccgcatctgtattgggtaatcttctgtaaggcatgaatttatattttatatgattagaaattctactaatgcgaaggtagtaaaaataaataactaaaacaatattcgtagaatcgttttgaataactttatattttactcttttatgctcttgtagttgttgtagatgtctaagacccgacggacatagtggtaggtttgcggaccattacagtagccattttttgctaaagaatcctggtaatattgtttttcatttttatgtcgcatgtaaaaatctacgttattctcccataagtagggatttttaccatatttttttgtcaatctaatagcatcaaggatatgaccgggtccagcattatatgaggctaatacgaatttaatgcgctcttgtggatcagcaatataagaagttaggtatttatctaggtatttaagataggaaacacctgcatggatattgctgtctggacgaaaatagtcgaatacatggaaatgttcagccgtttccggaatgatttgcattagcccataagcaccgaattgtgattctgcttcgggattgaattgtgattctgaaaagacaatggcggctaacaagcgccaatcccagcctagacgcttgctctctttctttagcagctcatcataaggggagattttgccttcgcggagtagtatgtatttggatttgttaccaatggttgttttgctattattgaaatagcgcttgtaaagatattgtaattttccttcttggcgtattttttgtagccaacgattgatttcatcggtcaataagtctgcttttttattggagacccacgataccgatatgtcattcttcaatttggtggtgaagtctaggtttttcatggaaaaactactagcgcgggcgatattttcgtcaacaacagtatagtgaatgactccggtttcgactaggtgtaataaatcttcattgaagatttggtctacttcccgtatatgtattttgatatttagagagtcttccaattgttccaatgtctttttataagcaggaaaatttttaggaataaagatttctttgccatccagattttttaggtttcctattggagagtgatttttgttttgcaccaagacttcattcgtcttaaaaaaaggatgacagaatctgagtttttcctctctgtccggagtggacgtcatgctgattgccagcaaatcatatttttcgttttggaggtggtgtatggctgtatctggattgttgttgatttctataatttgtaaatttaccatcaggtaatctgcaaaatctttagccaagtcataatgaaaaccacgggagattccttgataaatatagaaatcggtagtgttgtagaaagtggatatatttaaagttccccgagttaaaattttttccaaatacgaaggctccggaagtatcatttccgaagatgccgtatgagtaacattgcaccctatacatactaatatgcttatatacgtggcaattcttttgaatgtcattttgtaaaaatacgaaaataaacggattaatcaaagaaatcccattgaatgccgaattttaacattgcaggattgatgggataatcggctgcactgaaaaaattgccatgttgtttgatatggaaatttacgtgttcgtatttgacaaaaatgtgtgcccgtttgatattgaggttcaggaaaacatctgctttgggataatttcctgttttatatttccgttggttataaaattgcatgatagcaggagcatagttgtctgcataaaattttgtattataatacaagtcgaatcctatctgcaattgcagagctcttttgaataggtgattctggtagtagttgtgtgaatataatgcaatagctggaagtgaaagaatgtcttcctgtgtgcttttctgaaaataaacagattggtcaaaatagaagtgacctgcacggaatacctcttttgcccaagcagataatataatcaaggttttgctggtttgttgaggcataatggtggaatcgaaatatacatagctgaagatgtttgtaaatccgacacctaattctgtgtgtaaacgcttgtttatgtatcgtccttctaaattgatggttttaatagctttaaagtcgttatcccaaatattatggttgccgacatataaatctagaaatggattgacgctttgtaattcaattttcgcatcagcccgcaagaagctacttttgtctttgcgaagcgcttgactgataaaaccgtcaactttgaaatttccggcgtaataccctaagatgccgatacgtcctgcaatatcgtaattcaacatggcattggtatcgatgttgaagagcccggcagtaatataggtacccatatagtttttggagccttctgtagcggtgtgggagactgtatcaaagtttataacttgttcatatttgtctcttttgaaatccaaaccggcatatatcccaggaaggtatttatatttggggtgttcgtttacgatgaattttgcagagaggtcaatcatcttgcttttatagtggtctgatgttttggtgctgtcaagatacgtatgccgataaaagtcaaagttgatgcttccttcttcaaatttgtgacgattgttttgggtgcggatgttgagaactgctttggcaggataaacttctgaagtatccttatcatggatcacttgcttcggttttccaatgttgtattgtccttgtacgttgaagttaataattcgaaagttattatatacttcatcctgacctaaccaagtttgaatgttttcagctttttcgatagagtctgtgacataagttcggtcttgaataccaccattttcacgaatttcacctttgtgttgatcaaacataaaggaggcaacaattctgtcacgttcataagacgaaaaaagcgaaaagttggatattttgcttttttgatttgcgtatcgtccgtcacttgaaataaggtggtagcgagctccgatattccaaaacggattgatgttttgtgaatgccaagcatcaatcatattttctgctttaccttttcctcctccagtgaaatatttaagtcgagtgtatggagtggtggtattgaagtttatggcatcttctggcatgaaaagaaagctgcgcaggtaggttaaaggataaaaatcttctactgcgtttctttcaatgaaaatgttggattcgtatggcgaaggaaaatttcctaaataagtattggaaatgctttttttgaatatatcattgaaattatgaattccgtcttgtaaagtatctaagggtacttcttgcggatatacgccgttacgcatccatttccacgtatatctatagtgtggaacgttctcttggggcacagaatcacgctcagactcttgcattccatgctcgtcattgtaagagttatagtcatcaaattcgctctgtgccagacaaataagatgcaaaaaggtcaatatgaatatgctgataatttttttcatcgctgcaaatatacgcaaacttttaaaactctcataaattagttacttttgtaccctcagaaaaatgagtttttaaagtacatgagagtgggttgttgttgtgaatgcttcgctcttgtggattttgtggactttgtaaaaaagacatttatggagaaagaccaacacattgtagaacccgaggaagaaaaatcattgaacttcatcgagcaaattattgaaaaggaaatcgcagaaggtaaaaatggcggaaaagtacatactcgtttcccgccggagcctaacggttacttgcacattggacacgcaacttctatttgcctcaactttgggttggcggctaaatacaacggtaagtgtaatctgcgttttgacgacacaaatccttcgaaggaagatgttgaatttactgatgctatccaagaggatatcaaatggctgggattccagtgggatggagaggttcattatgcttccgattatttccagcagctttatgattgggctgaacaaatgattcgtgatgggaaagcatatgtggatgatcaaacggcagaagaaatcagtgccgggcgtaagactattacggagccgggagtgaacagtccttatcgtgatcgttctgttgaagaaaatatggatcttttccatcgaatgaaggctggtgaatttaaggaaggcagccgtgtattacgtgcaaaaatcgatatggcatctcctaatatgttgatgcgtgatccgattatgtatcgtattatttattgcagccaccaccgtacaggtgataaatggtgtatctatccgatgtatgactttactcatggacagagtgactatttggaggggattactcattctatctgtactctggaatttgaaattcacagaccgctttataattggttcttggatgaattgacatctacagaatatcgtcctcgtcagatagagtttgcccgtcgcaatttgaactatactgtgatgagtaaacgtcgtctgttggaactggtgcagaaaaaatatgtatcgggttgggatgatccgcgaatgccgactatctgtggcttgcgtcgtcgcggttatactccggaatctatccgcatgtttgctgaaaaagttggagtagcacgtcgtgaaatcgttgtggatatggcattgttggaatattgtgtgcgtgaacatctgaataaaaccgctcctcgtgttatggctgtactggatccggtgaaggtggtgttggacaattatccagtgggtcagactgaaatggtggaaattgaaaacaatccggaagatccgacagctggttcccgtcaggtagcttttggcagagaattgtttattgaacgggatgattttatggaaaacgcaccgaaaaaattcttccgtttaaccccgggacaggaagtgcgtttgaaaggtgcttacattattaaatgtacggaccatattgaaaaggatgaggctggcaatgtgactgttattcattgtacatatgataccgaaagccgtagcggtagtggtaatgaggctgctaaccggaaagtgaagggtacgttacattgggtggctgcagatgatgctattgaggcagaagtccgtttgtatgaccgtttgtttaaagatgaagatccggcaggacataaagatgttgattttaaagaatttattaatgaaaattctttgcgggtattgacgggatgtaaattggaatccagtcttaagacttcgcgtcctggtgatcgttttcaatttcagcgtttaggatatttctgtgtagatccggactctaaggatggtaaattagtaattaatcgcactgtatcattaaaagatacatggcaaaaaatgaataagtaaatgaagaataagaatcttttgaaggagataaaaccttatttgattatcaccttcggtatgttaatctactcttttgctgctacaggatttttagtgcctcataaaattgtaggtggtggtgcaacgggtatttctactgtgttgttttatctgtttggtattccagtgggtgtgggctatgctttggtaaatataattttgttggttattgccatgaagatattgggccccaagttcggtatcaaaacgatttttgcaatagctgttggtagtatattcttgggtattatgcaaccactgatgcctgtggatggtattttaccggatgaaaagtttatgagtactatcattgctgcaatgttgacaggtcttggtattggaatcgccatttctgtgggcggtagtacgggtggtacggatattattgccatgttggtgacaaaatatcacaatgtaagtcctggaaagattttaatgttctgtgatttttgtgtaattgcgatgactctgttgatttatgatcatattgacagagaggctgtcggaggtttgatatatggttatgtcatgatgggtatcgtgtcctttacagtcgattatgtattgactggtaagacacagtcggctcaattgtttatttttacagataaatttgatgaggtggctcgtgaattgacgaatcaagtacatcgtggtgttactcttattgatgctaaaggatggtattccgggcaggataaaaaaatcatcttgattgtagctcgtaaacatgaggcttctgatgttttgagaattgccaaacaagttgatcccaatgtatttatgacaatggctcctgtgatgggtgtgtttggtaaaggatttgatgaagtgaagggtgtgaaataatacgtctgattgtaaaattaaaatcgggttataagcaaggagggcttataacccgatttttttatgtaaaacaaaatggaatatctatagagtgatttatttgcatatcagttaaaatgtatatatttgcctcctaagttgtaaaaaaaatcatggaagaaaaagatatcttgttcagtgctataaaagatggtgactggaaggcatttacttcttgttttcagcaatatgccgaacaattatatctgtatgcttccggttttcttggtgatcaggaggaggctcgtgatattgtgcaagatgtctttatttatgtatgggaaaaccgagaaaaacttactttttcagaacacttctctgcttatttgtttcgtgcagtcaaacatgcttgtgttgattacaaacttcatgaaaaagtgaaggaacgttaccagaatgaaaagaaactggcggatgagtgtgaagatgtatatgaggatgattttgacgaacaatatttgcgtttgcagcaggtaataggaacattgccacctaaatgcaaggaggtttttattttaggttgtgtggaagaattgagctataaggagatcgctgagcgtttggatttgtcaataaatactgtgaagacacagatgaagattgcctataaaaaaatcaagtcagatttcggagatgggaatgtgatgttgttgggtgtgttatttggaaattggttgaattgaaagaaaaatcaaaaaaaacattatttcttttcaccctgaataaggtgttactcgctttttaataaacggaagtaaaaagcgagatatgactaagcaagaagaaaaacagtggttacgtgcaattctggaggggcgggtaaagcctggagatgaagagtggaagcaggtacgtgaaggtgatgattttgagggggttcgaagatctatacgtaaacgagctggtttgcatttagaaaatcgagaagatgatttagaagttatgtggcaaacgatagagagtcgtttgcagcaggattgtgtttacaaaaataataaacagcatcgaagattattggtttggacttcttgggcagctgttgttgtgttattaatctgtttgccaattttgtatgggcgtagggagaaaaaagagcaacaaccgatatttacgacagcatctttggccaagcaagaaattgtgttggtcatgccgaacggagagcgcaagacattggatgatcagaatgaacaggtagtcgtgaatgagtatggggggatgaggacaaatgataggactttgattgtagaatcggataaccaaaatgacaaagagcctcagtattatactttagatgtgcccaaaggagccgaatatagtctggtgttagcagatggtacgaaagtttttttaaatgccggtacaacattaagctatccagatcgttttgtggggaaaaatcgtgagataacattaagcggagaggcttatttggtggtggcaaaggatgccaaacatccttttattgtaaatgccggggacgtaaaaattcaggtattgggaactgttttcaatgtgaatgcttatcctgaaggagagtgggtgcgaacaacgctggtggaaggtaaagtacaaacagaatgcaataatcaaaatatcacaatggaacccggaactcaggtggcatataacagaatgtctcagattgtggattatagaccagtgaatgtagatttatatacctcttggattgaaggatattatgattttgaggagatggaattgggtgagttgatgcaaacaatttctcgttggtatgatatccctatcgattttgagtcggcagacttgaagagaataaaattcagtgggcgtttacaacgttataactctgttgaacagcttttcaaaatgttggagtatactcaagatgttgattttgatataactaaatatagaattacgattcggagtaaataaagaaaaacagactgtagacctgatcaatcttcagtctgcactaacaagatacagacggtgtataaagtaaatccgaaagtatctatttataaccaaataatattacaaaagtatgaaaaaaatgcaagacaatgtattgccatggcgctatatgtgccgtagtatggcaattttgaggacttttcttgtactcttgatgttgggaataggtctttggcccagtcaggttttggcacaagaaaagacaactgtaacacttaatttgaaagatgttactttgaatgaagtgatatctgaaataaagaaacaaaccaattatgatttcttttacaaaagtgagttgctgaagtcaaagggacaagttagtgtaaatgtaaaaaacaaagacgtaaaggctgtattggaagacgtgttgttgccgttagggctggagtttttagtacagcagaatttaattactattagagagaaggctactcccaaagatgacaatgtgcagatgattacggtaaagggtaaggtgacagacaaggatggtaatcctgtaataggagcaactgttgtgatttatggtactacacaaggtgtggcaacggatattgatggtaagtatactttgatggcccgtccggatgatgtgttgaaagtttcatttgttggatataaagctgaagttgtgcctataaaagggaaagctcatgttgatatcgtattgagtcctactgcagaaaatctggaagaagtaacggttgtggcttttggccaacagaaaaaggagagtgtggtttctgcaatcactacagtacgtccgatggacttgaaaagttccagtagtgacctaactagtagttttgccggtaaaattgccggaatggtagggtggcagacgggtggattgccagctgcattgacagaggaagaaatgaataccaagttttatattcgtggtataacttcttttcagaccggagcaaatgtagatccgttgatattgttggatggtgtagagtcgtcaaaattggatttggctcgtattgccccagaagatattgaaagtttcagtgtcatgaaagatgcttcggcaacagcgatgtatggcgctcgtggtgctaatggtgttatattggtgacaacaaagaaaggacaagaaggaagtgtttatgcaacggcccgttatgaagcagtattttcaatgccgaccaaacgtttggatgttgtagacccgatagattatatgcggatgtataatcaggcattgttgtctcgagacccactggcaacacccaaatatagtgtagaacgcattaaccgtacacgttccggtaaatatccttcttgggtatatcctgcaaacgattggtatgatattttgtttaaaaatttcaatgtaaaccatcatgtcggtgtaaatatccggggaggctctaaggtgattcaatattatgcgtcagtgaattataatcgagatcaaggtatgcttaaaacagataaactgaatgattttgattgtaatattacgaataaccagacatctttccgtacgaatttaaatatagacctgaaggctggaatcaaattggtgataaactcatcaacgacgattgataaatatcatggtcctctctctagtgttaatcaggcttatgcattgtcttttaatgcatcaccggttgattttgcaccgatgtatcccggggatgattattattcttggccggaattgcgttttggaacaacagaggcaaagcagacaaatccttatatggaaattcaaaaaggttatttggaacgtactcgttattctacaatcaatagagcggagtatattcacaatctttccagtttgttgaaaggtttggagttaagagcgagcgtttctgtggcacaagcgggttattatacaactggttttatgaccatgccggcgatgtttgctttattaaattacgattttgagaccggtaaacaccaattgcaggatttgtctactaccagtaatagggcattgactgttaatcgtgacgcttcaacgtcaacaacagatactcgtgttacttacgaagcccgtgctttacatacggcagcctggaaggaacatcaaacatctctgactgctgtatttcaagctcaggattatacctttacaccgatagacaatgtcttgacaggaatgcctcagcgtaatatgactttttctatgcgtggaacttatggattaaaggaccgttattttgttgaagctagttttggttataatgcttccgagcgttttgctaaaagtaatcgttggggatttttccctgctggcggtgttgcatgggttgcttccagtgagccttttatggaaccgatttctcattggtttaattttttgaaaattagggcttcttatggtaaggtcggtaatgatggagtgatatcaacacctcgttttgtctttttgccaacaatggtacagcgccctaatatgatggatcctgaggcagggaaaggcgttatgacttataaaaaagtagcaggctatacgaatgaaaatatcaaatgggaggtagcagagcaggtgaatttaggtttggaagctaaattttttaaaggaatcgtagaactgaatttagatgcttatcaggagattcgccataatattataggctatcgtgcaaatgttccggcttcatcgggaatagaatacaatcagttggccaatatcggaaaagctcgttctcggggtatcgatttttcaggaaagatacagcatgcatttaataaagatctatgggtaattttgaatggaacattgacttataataaggtggtttataaagaggtcgaagaggctgctaataagccagtatggcaacggatggtaggtaaggaaatttctcagcctataggttatattgcagaaggtgtttttatggatcaggctgaaattgataatgcacctcgtcagaatggagatgttttgccgggagatattcgctaccgtgatttgaataacgatggagtaattgatgtaaatgatgctacatatatcggtttcccggagactcctcgaattacttatggtttttcaggtttcattaattacaaaaattttgaatttagttttgctttccaaggatcaggtaaacgttcattttttatggatccttccaaattgtcgccttttgtggacgatcatgctatgctaaaggccatttatgaggaccactggtctgaggataatatggtgcgcaaacccttttggccgcgtttgtctacgtttaatttggtacagcataatccggaggaaaactggtatgatcccaaagcagctgaggttcgtaagagtacttattttatgcgtgaatgtcgtttcttgagatgtacttctttggaattggcctataatatgcctaaacagttgatgaatcggtggaaactgcagaatatgaagttttttgttagagcaaataatccgtttctgataaccaattttaaaatatgggatgtcgaattaggtgagagtggttttaattatcctatacagaaaacgtgggcagttggccttaatttcagtttctaatcagataaatagacgaaaagatgaaatatttaaatacattgttggttgcattgattttacttctgtccggatgcacatatctggatgtggtccctaaaggagatatagagagtgtagagtcaatttttgaaaagagagaatccgctgagaattggtttaaagtctgccatgagtggttgagtccgtttacagcatcgcatatttccaatccggcttacatgggcgcggatgaagtggttgccggtaattttatgaggcagcaattcagttatgcttggagtggattgtatattgcagacgggatgcagatggcacaaaatccttattgtaatatgtggcggaaagatgctgtttataattccattcgttattgcaatacctttctggaaatggtgggtaatgtctacaatatgacggatgatgagaaggtattgtggtcagcagagataaaggctttaaaagcccattattattttgaattgttgcgtcattatggtccttttgttgtggtgacacagaatgttgcacctaatgctgatattgatgatatgaaactaccgcgtagtccgtttgatgtttgtgtagaagaaattgtttctttgttggatgaggcaatgaaggatctgccgccaatgaatcagaaagaagccagtagaaaatcatatcatagtttggagtcggctgcagcattgaaggccatgaccttattttatgcggcttctcctttgtttaatggtaatccggcttatgcaaattttacaaacagtaaaggtgaaaagttgtttaatgcaactcgtgattctgaaaaatggaaacgtgctgctattgctgcagattctgcgttacatatttgtttgcgtaatggtaaaagtttaatatcaacgacttctggagattacgtaaataaagatttgaaagatgtgattgctgatgtcagtaaatcgtctttgggcttgaattttgaaaatcaagaggctatttttatgttccattatgaaaaattggatgacgaatcgtggactcgttggacgcgaccttactataagagtacagacccggattacaatgcttccatgttgggatgtatttctcctagtatgaagatggtggaaatgtattatactgaacatggattacctattgatcaggataaggagtgggattatatgtcacgttatcagttaggtaaagagactaataaaaaatataaaaatgtggttgaattggatgaaaacgtgttgcgtttgcatttacgtcgtgaaccgcgtttttatgctcatgtggctgccgatcgttgctactttcagatgggtaccggcttgccagtcttggtagaagcttatcaaggcgaacgatttggtacattacagacttctttggtgaattcttctccgcagaatttgacgggttattggatgaaaaaaggttctgatccggatgtatccaacgtgggatataagaatgcattcggtcaggaatacgcttgtgtgctgatgcgtttggcagaattgtatttgatgaaagcagaagcctggaatgaatatttggaagttccagataaagagcatgtttatgaacccttgaatgaagtgcgtagacgcgcaggaatcccggatgtggaggaagcttggcaggattatgcaaaagatccgaataaagtaagaacaaaagaaggaatgcgtgaaatcattcatcgcgaatgggatgtagagtttgcttttgaaggacgtcgtttttggaatttgcgtcgttggttgactgcggaagaagagttgaatgccagtcaatatggatggaatattattggaaaagatgctcgtcagttctacaataattttgaggggccggtagttgtttggactaaaagagagtttattgcaccaagagattatttgtttccaattcgtagtgaggaaattttaatttccggttgtgtacagaatccgggatggtaataatttaaattgcagattatgaaaaagctatatttcattttaatatgtatggtgtgggcattggctagttgtcaggatgatgagtctgtctttgatgtgaagatgcctgctgagggaatttctttttatccgattgccggaggtgctgtaatgcattataaactgccggctgatgagcatgtatataatatccagttacgttatcaggatgcttttggacaggatgttattcgtacaggaagttatgcatgtgattctttggttattgtgggattcaatgaggcgcagcaaggagtgaagggatacgttactctgtgtgaccgtaataatgtcgagtctgaacctttggaagtgacttttgatacaaaagattccggaccggtggagtttataaataatttggaaataggtccgggttggggaaaaggttttacgatgtcctatgaattaaaagaagatgtcaaaggaatggctcatgtattttatataggagaagatccgcattctaagcagatggatacgatattgataaaaagttttgctttgactaagggtgctgtgacactacaggatacattcaaacaaaagcgagattcttacgatattgtggtgagggcagaggattttcgtggttatatggtaaaagagcggatttggaaagatatttctccgcgtgaagtggagaaattattacccacaatgatggattttcatgatccggaaggtttgtctattgaggatcctgcattcaaattgggtaaggagtatttgtttgatggagataccaaaggagagaaagggttcagaaaagaaactggtgctgatttctatacctatttagcgggaccgatggcaatttcaacacctgagaatccggaaaaaccattgtttattatagatatgaaagaagaaaagttacctgcagaagtaaggttgtatggaatgctggctgtacgttcagattggccttggggtcctggtggatattatccggagccaaataaatatggacgaatatggacatcctgttatccgagtaaattaccaagtagcgtgactctttttggttcgaactctatggatgcaagtgcaacttgggaaaaaatagttcattttgagcaggagcgggatgtcgtaaatgaagatcgttggtgtgcccgttgtaatcatatagattataaacaatatgcaatttatgattttgataaattaacattagctcctccttgttatttaacgttgacttgtccggcagacggtaataaatatcgctttttgaaagtggtagtgaatgaggtgtttatgaatccagatggtgggttcgagtctgcagaaatgggggctaattatgataagcatgttacattgaatgagttggaaatttttacggcaaaataataggttatgaagatgttaaaatatttatggttaggctgtttactgctggcatttggcagttgtgaaagtctggaggatacatatagtgattatgccgaaggtggagctctccgctatttgggaaagtgtcgggatttaaaaatagaaccgggctggaaacggctgattgtatcttgggaaaatcatgtagacccgatgattgataaaataaaggtatcttggaccgccgatggaatcagcctagatacgatattggataagaatgctacttcattagatatttataatttggagaataaaacctatgaagtttctgtatgcagtatggataaaaatggtaagacttctttgtctattacagactatatgcgtccctacacgtcagaacatgaaaatgtactggcttttactaaggttgtcaacaagcatttttttgtgaaaaatcgcttggtgttgttctttgataattggcaagggaatgttgagtctgctgtcttgaaatatacttctggtggtcaactgaaagaattgcaattggatagtacttttgttacagacaacgcttattttcttttgccggatgtattggattctgatgctgctgtgacggtagagcgtagtggtcgtttggaaggatgtgatgatttagttgtatttgatcctcatgaattaacccatgggcgtgtatatactgccggttttagggagttgataagagaaaaatacggagtgacggatatcacggatgaatttgtaaattctttgacaagtttggatatcgactataatattgagacttttgaagacattatgcatctttcttctttgaagacattacgcttaggtgctaatcgctatatgaatgacaaatatttattttcaattggcgctgacagtgaagtggagcaattggaacgtagtatgtttgctttaaaggttgcgagtgaagtttatggtttggaaattcagcattataatgatctttatttcccggaaggagaatatgcatttgtaaaagagatgggaaatccggaaatcaaggagaaagaatatttgattgctgacaactggaaatatacttggtctgcaagtgatccggatgatgatttgcaggtggatgtcttgtttgataaagattctgaaggcggttgggaagttcgcagacatatggctcctgttattactcatgagattattgttgatttacaaaatgtgaaatcattgaatggaatgaaaatcacacagaaagatgtttctcccggtacaaagcaacatggaattttagcaaatagtataaagataaagctttccatggatgaggctgtttgggaaaatgcaacttatgttgagaataacaaattaggagcaaccagcggagaagtcacttttattgatttcccagaacagaagagggcacgttatgtgaaactgatagttgaagaacgtccttatggaaacactcaatatgcagtatctttaggcaaagtaagattatattgatattttaggtattgtaggatataatgtcagaatcaggctgatcgtattcagcctgattcttttttttatatgggatttgtctatttattgttagttgtgcgttgttaacaattatgttaatggatttcttttacctttgcgcttcttttcccaaaatgaatattgggattgaatagcaggcgttgtttatgaagtgataccagtatatagagactggtttataggtcaaatttattataagtttataagatgagtaaagcgaaaagtgtttttatttctcaacgaatttgtttgtttttttgggtaagtgttttgttgtttggttgtagtgatattgtttatgaagagaatatacattgtaacgaaatagaaaagccttgggaaactgatttttgccaagatacaatcagttttggtaagcttgcttcggattgttgtcgctatatatttcgtttagacgagtcttctgcttcaataactgataatacaaaatatacgtttcatattaatgaattattgcaggtacgtgctacctcatcaggagattctatccgtattaccagttattctgctaagacaatttatggtataactttggaaatatatttaccagaattaaatcattatctgccggctgtttattttgattcaatccctggattttctcaatttgagtttaaaccgtcatttattggcaagcgtattctttataaatgtgctgatgaaaaatatgttagttttgaatatccatatttggatatgaatcgtatgactcctcgtttggtaggtgatgatgctcatttgaagatgttgcagcaaatagatgcacaatggaaaatgtttttttctaattatgattggagttctgaaaatactgcagccaattggcgagagatgcgaccgattttcgccagagaatggatcgtaatgatgactaattatgcttatatgatgacgactccagaatataaacatgtgatggcgaatttcagtcgagtattcggtggagaattatgtgataatgaaaagactccttttactgctgatgattatgcagaaagacagaattacttcaagcggccgcatacattccgcttaggacgtaccggagatcaagtgagcggattaggtggtggtacaacattaggtattgccggatataatttttatgggcattatgcttcgtatagtggttgggaggccgttgggcatgaatttatgcactgtatgggatatagccattctagcaatatgacttatgctgtgaaaggtgttggctggactgaatttatatggcagcttcatatttggctgagtagagagaaaaaattgccttatttagatagacatctgttggattttaccaatccggattatgtgagttatcgtgataatatgggtattagaggcgaatttttgaatgatgttgaattagaaaagaaaatcctgaacttctataatggaagtaaattagtgaaatattttaaagaaaatccattgacagaaaaataattaagcatgaaaaatagaaaatactccttattgtctgcttcacgtttgtttgttgcattgattttagtgtctttattggtagcttgtgaaagaacagagtacaaagatatatgggcggactgttatgtagagcccaaattggatacaattgaaataaagaataattggtatctggccgaaccgatgcttgtactgctgatagtttcgatagccaaaaggattttgttctgtttaatttatttttggatggtgataatctgtatgttgccaaccaaaagggtaaatgtgtcgatgtatttgatgctaaaaccatgaaatacaaaaatagcctggaacatgatggtcgtacagttgctcacgatgtatatgtaaatggcgaacatatatttgttgctacaggtgaaatgtgtgctattcagatattcgataaggcaagtggaaaatatttgactcgtttaggtacaggagggtatggtggtaatgtttcaaaatccggttgtgtagctgcgaatgaggattttgtttttgttcgagattcaaaagaacagaatattcgtgtttttgagcggaaagcgatttctgtagataaaacggataataacactgtttttgcacgtttggatacaaagggtttttttattaatagtggtgcggaacctctaaatcattcttatgatatggaaatcatcggagattccttgtatgtttttttacatgttcaaggccagatatatgcttattcattggatgaggtaatacagaatgcagttgtcttcccttcaaagacctctctgcctgcaggcgaaaaagtgtttgcagctgtccctgataataagaataatacagtatggatttcaatggatgtagacggaaaaagaatgctgatagaagtttctcaagatgattttttcaatcgtgcatttaatgctccgctacgttcatttatcagtgataacagacacatttttccggaacaaccaatgattgcttttaatgacgaaatgttattttttgtatcaagaaaaagtgttgaacgatggaagattgctaataagccattttatgtgataactcctttaaagtaaagaatagtctattgattatagtaaaaatcccacattcaacaaagcttagaatgtgggattttctgtaggattacattatttcgttataggtataatcataaatccccaactataatctttattggctgggattgtgtaagccggttccgggcgagctccccagctgttataacctgcaactccttgttgtttcatatcaatacatagctcgacaaaattgcggggttgtatatcattgatatgggtcatacggcgaagacggttgcgtgcccttgccggattgtgatcagcaatctctttaggagtaaaattgttccattgataatcgtgttgttttgcctcctctgagtcaaaatcttcaactgaattatgtaaagcattaaatcccatgggagcatctcccttaatcaagataccatgtccgttttcatctttcaatgaaatccagcgagtatctgtatgatgtccgttttcctgtggacggacatatgggaaatacatgtcggcaactgtggaattgtaaattccaagcattgaaccagcattacggtcgggataattttccaacggaccacgtccatagtattctatgtgtttcatgtttttaggaaggtgtaggcgcattccgatacgaggaacattcaagcctactgcagctttgcgtgcagctgcgacatccggactgaatgtggctgtacgtgcttcttcggaaagttcgatttccttttctgttgcggtcaacgaactgaagtgtccttttacatagatggctccatcgggacgaatagagtattctattgtataaggattgccggcagctagcaggtagaccacctttaaaatagcgatgttttcttctgtatgggtagaggtttctatcacttgaaaatcgtggctggattttttccagatctgcaggcgctcaggcattccgttgccataatcattgtctgttggtccgcgccagaaattgggttgcaatccaaatccgtcttggaagtattcaattccgtttacctggtaggacgtggcgataccttgtttcttatcgaaaacgaatttaagtacactgttgcttacaatgatttcgttctcttgtgtttctatattgggaactttaccttttaccattgggaatcgtgtagctgattcttgcttgagtgtcggtataacaagttgttcttgtgcaatggcatagtttgctggaattccccgttcttcttttttcgtgtaaactgtcagattgagtaaatattccttgcctgcttctgtttttagtttgagagggatattgatattttcagtctgttggggagctgttgttaatgccagattacctttgcgaatggatttcccattggccaatagattgtattcaattcgatattcggaaaggtcactgaaataaaaacggttggtaacaatgatcggaaaatcggtatatttaccggcaatctgttcttttgataacgcatttgcaaaagagacattttggtatgcatgtttaacttctgccattgcagggtgaggattgcggttagggttgacaattccattgcaaaggaagttaccgtcgctcggtgcatttttaccgaaatctccgccatatgcccaataaccgccatctttatttacccaaagtccctggtctacccaatcccaaatgtatcctccctggaggttaggatatttgtatattgcatcccattgttcttgcaggttgcctgatgaattacccatggcatgagaatattcggagggtacaaccggacgatcactgccgtttgctccgatttgttccagccaggctgcactgggatattgtggtacatacatatcagagttccattcccattgagctcgttcataacatactggacgattcatgctcttttgttctctctcctttacccaaagataagtttggtagaaattgtagccatttcctgcttcatttcctaaagaatagatgatgacagaagggaagttcttgcttctttcgtacatattgattgtgcgatccatgtgggcagtaagccattccggattattgcctaaagtgcctcctttacgtaagttatagtacataccatgcgattcaatattggcttcgtcgtatacatacagaccatattcgtcacaaagttcatagaatcggcggctttgcggataatgacacaaacggacgctattgatattattttgccgcatcagttcaaagtcgcggcgcattagttcttcggttacataatgtccggtttctggattgtgttcatggatattgactcctttcagcttgattggttgtccattgataaggaacacatgataggggcggccgtgagcatcgagctgctgtgtagtgctcatttcgaaacggcggaatccaactcgtgccggaatgacctctgtcgtctggttgccttgtttgacatacatgaataatcgatagaggtttggatgttctgcagtccaggttgcaacagttggaagtgtagcagaaaattccgcacggtttgttttccctgcttttactggtatgattttttgctctgtagctactactttaccaacagggtcataaagttcatattgtaccgtcatcacctcgtcttgcttgcctttattccttaaatcggtagctaatttgaaaataccgttttggtaactgtcatccaatgttgaaacgaggtggaagtcttgtaaggctgtttttggttgcgaccataaataaacatcacgttcgataccgctcatgcgccaaaaatcctgacattccagatatgaacctgtacaccatctgaatattttcaaagtcaatacgttgtttcctgattgtaggtagggattgatataaaattcagctgttgtttttgagtcttcactataacctacttctttaccattgatatatacgtaaacaccggccttggctccgtccagattcagatagatgtcgcgaccttcccagtctgccggtattttaaagtcgcggcggtatacaccgacaggattctcttccgggagaagaggcggttgtggattgcgaggcttgaattcataaccgtgattggtgtagattgcagtcccgaatccttgcatttcccaattgcccggtactttgatatcatgccatttttctgtgttgacagaagggtctgtaatattttcaggcagttgtttatacgagtctacgaaatagaatttccatataccgtttagcagcagatagtatggacttttttcgtatttcatactttgtgccgtagctttgtccggataggtcataaaggcactacggggatactctttgttgacggcaaccgttttaacatcttgccaataaggcttgttgttttgtgcgcggcatatagtcatgccgatcaatagcaacatactaagaatgaacaaatttttcatgatagtttaagatttggcttttaaatttgtgccgaagttagtaaaataattaaaaaacattgctataattagcgaggtttttgttgtgtatatctgttttttattcctttaagaaatagggatacgtatgataatggttaaatggtgcttaatggtaaaataaaaaatgctgtggcctttaagtgtaagattcttcttgtattagttttttcatgaatctctaatagtctgaatcatgtttaattcatatcaaatctatatcaagtccatattgaatcctatatgaatgctatatgaatcctatataaatgctatataaataggattcatataagtaatatataaggtaatatcagctctattcctgaaggtgatatggatttgagtcggttctaatgttgttgagggggacgggagctgatgaatagctgaaagcatgattgtttgtcatatgctttcagctgtagtatattattttactttttccagtttgattcctacagtgtaatagtgaggtacgtgcgtaagcagcccctcttctttggagtctgtatcaatttctctttctccgcacagacgcatcattccggatttatccatccatcctgagccatagaatatgagaggtattgttatacggtcagtgttggcattcattttcagaacataaggcctgccgtcatagaaatagcggctactgttagcgatagcatgtaatgggagagggcaggaggcttgcatgcattgcggggcgttgaatgtcagtgtcgttacagaatcttgttgtcttaggtatattgataggtctgttatacgatgccatattttttcatcatcaggaatgttatatacttctctaaattcttgttcgtttggcaaatcgcttaataattctctatttttacctagatggaaaagttttattcgtttggtatctttgcctttttcgtgttcatcaacatataggcttacgttgtaggtattatttgataagggagtgagatcaaagctgtatatgctgatacctattgtgttaagaacttcaataatgtcgtttgaattcacctgtcgtggattgatctttagggaatcttgtgcagacagagttagagtggtataaagacacgctacgatggttattaattttttagtcatgatgtggatattgaaaaggttaaatattgttttgatattgcaaatatatgagatttagtataaaacagagttgtgtttttctttttttttgcgtttcatttttgcaattattcttttgtgatataatctcaatgtgaataattttctttatctttgtattgaattaaaaaattgattatgaaatatttggatccgaaggcggatttgacatttaaacgtgtctttggtgagcatcccgacttggtgatgagtctgctcaatgcgctgcttcccattccggaggggcaggaaatcacggaaatagaatatcttccggcagaaatggtgccggataatccgttgcgcaagaatagtatcgtggacgttcgttgcaaggacaagttcggtagacagtttcttgtggagatgcagatgatctggtcgccggaattcaaacagcgtgtattgttcaatgcttctaaagcctacgtgcggcagattgatacgggggagcaatatgagctgcttcagccggtgtattcgctgaatctggtgaatgaagtatttgaaccggaattggaaggattctatcattattaccgtttggttcatgaggagcatacggacagggtgattgatggcctgcatttgatatttgtcgaattgcccaagtttagtcctcattcttacagtgagaaaaagatgcaggtgctttggcttcgctttttgacggaaatcaatgaaaagactcgtgctgtacccgaagacttgttggcgaatccggaggtgaaaaaagcgataaccgctttggaggagtctgcttttacggatgcgcagttgttgggatacgaaaaattctgggatattatcagtgttgaaaaaacgttgtatggcagcgcagagcgcaggggattgaagaaggggctggaacaaggtatccggcagggcattcaacagggcattcaacagggtattcagcaaggcatagaacaaggaaaacttgaagtggccagaacgatgaaatcgaatggcatgtcgattgatatggtcgctaaatacaccggtttgtctcttgaagatgttagaaatttatgagtatataagttagtagagttgcatctctaccgataaaatggtttctagtcccgcttttcttggaaaaaaaagaaaggcgggacgcttattttctggcttgttttattttttctggaatagaatggaggtgaatttatgatttctgaaaaaatctttatctttgtcagtctgtaaaaaagagagttatgtctgtaatttttagatgtttgcttcttgttctctgtgggtggttgtatagctgttcaacggatgagaaaaaatgtgtttgtccgcaggctccggattatgcggaaacttccatgtggtatgatgttcccggagaaaatggctcgaagaaagaggtggatgttttttatgtcttgcccacttgtgtgtgggattggcaggataaggagggaacgctttatcactatatggatgttcgggattctgtgcaacgggcagcagtggatgggtcgaattttctggcttattcgctgttcggcggttgttgcaatttttattcgccttattatcgtcaaataacaatggattcttggtttgaagcgtcagaggagattgaaaaacgttatcagttggcgcacgtggatgtggtagaggcatttcgttattatatgaaatatttgaatcaggggcgtccttttattttggctggacacagtcagggggctaaagcggtgattgaactgctgaaacatactttgacacaagaggagtatgggcgtctggtggcagcatatgctttcggattttcgataagtagggaggaattggcccaatatcctttgttgaaggctgcaaccggagcagaggattgtggcgtggtcgtatgttataacagtgtttcccgaccggatgcatgttcacccttgttcgctgataatgtggcgtgtataaatcctgtaaattggaggacggatggacgttatgctccagcatcagaaaatttgggttcggttttttttgatgcgacaggcaaatcggatactttgtttcggcaagtgggggtgaggattctgccggagatgcacacgttgttgatagatggattgtcggatgatgattattatattccggtaatcgataggcttttccctaagggaaattatcatgttcaggagttgaatctctattttttgaatatccaggagaatatccgccaacgaataacgagttttttaaatcactaaatattttacagaatgaaaaggttgttttatttgttatgcttgtttgtttgttttgcatgtgatgataatgatgataaggttgttgcagatgtggataaaccttattctaaaatgtcttcttctgaattgaaaaatgtgttggaagagaatctgacagctcgcgatcaattggtggatgagtgtaataaggcttctgtaaaaacaaataaggaattgatgacaatcgccagacattatgattttgctgattttatagatatgaatgatggtttgcagtccgctgcttgtgcaaaagcagaggaagaggtagtgaaaggtgtgctgttgaagtggaaccgggataagaaggattttgatataacagcaaatgcagaacagtgtttggtggagattcaagtgccgtcatcgttgactgatgattccaaaaatgacctgcttgtgaaggtgacaaatgataaactgaatggtaagtttgaaatgtttgtttataaaaatgagacattgtggtttagccatattgttgaggctgataaagagaatgatttacaaacagaagtgattgtatgtccgccatatacaatgagaacggagcttgctgtgcgtaagcaagctgccggtggagatatcatgttgggtaaatgggcaaaggttaagtatgccagagtaacttgtgaaaaagaaggcggtttttcttataagggagaaatgaatcttgtggaggatgacctctctgttttattggattgcggcaatgtgcgttttactggtaaatttgtgggatttacagcttttatgcctttgttggatgaattggtagaagatggaaaggtggatatggctttgatggcagaattgttacggaataactttagacaaaacgtagtggtgtttacggatcgggatgaaaagattggggattggtatttcgtttttgatgaagagtctcgtaaagagagaaaattcaagtgtgtgtttcaagatggagaagagtatatgggtgtttggaaactaatataattgtgtgatttgatagagatatgatttcaataaataatgtcagtgtagtttttggtggttggtatctgttggatggggtctcttttttgattaataagaaagaccgtattggtttgaccggacggaatggtgctggaaaatcaaccacgctaaagatgttggcgggtttgcaagctccttcggaaggtagcattgcaatggcctctaatgtaaagataggatatctgccacagacaaaggtctatactgatggaaatacggttagaaaagaggcagaaaaggcttttgcagatttgtttgagctgaaagatgaggtggaacggttgaatatggagttggcaggacgggaggattatgattcgccggcatatatgaaactgttggacaagattcatgagaaaacagaattgttgtctatgcgtggagaggggaatattgacagggaagtggaagtagtactgaaggggttgggatttaagccggaggatttggaacgtaattgtgaggaattcagcggagggtggcgtatgcgtatcgagttggccaaaatattgctggcacgtccggatgtgtttttattggatgagccgaccaatcatttggatatagagtcaatcacctggttggagtcttttttacagagctattccggggccgtggtattggtgtcgcacgaccgtgcttttttggataatgtaacaacccggacgatagagatttcgttggggaaaatttatgattataaagtgccttattctcgctttgaggaattgaggaaggaacgggtggaacagcagatgagggcttatcagaatcagcagaagcagatcaaggatacggaggattttatagagcgtttcagatataaggcgacaaaatcggtgcaggttcagtcgcgtatcaaacaattagagaagattgaacgtattgaggtggaggaagaggatgctgcccgcataatggtgaggtttcagccggctgtccgttcgggagagttggttgtaactggacgttcgttagcaaaggcatatggcgatttacaggtgttgaaggatgtgaattttgaaattaaacgtggggaaaaggttgcttttgtcggaaaaaacggagaaggtaagtctactttggtgaaaatgattatgaacgagataccttttgatggggaactgaaaatcggtcataatgtaaatatcgggtattttgcgcagaaccaggctgatttattggatccggaattatcagttttggatacggtggatcgggttgcagagggggaaataagaaaaaagattcgtgatattcttggtgcttttttgttttccggagaggatgtggataaaaaggtgaaggtgttgtccggaggggagcgtacaagattggcaatggtgcgtctgttgctggagccgtataatgtgcttattcttgacgagccgaccaaccatttggatatgcggaccaaggatatattgaaggatgcgctcaggaagtttgagggaactgtcattgttgtttcgcacgaccgtgattttctgacaggattggcagataaggtttatgagttctctaatcggaatatgaaggagtatttggggggtgtaaccgatttcttggcggcgaagaaaatagcttgcttccgtgaatatgagcagttgcataaatctgtagcgtctgtatcagtggaagaagtgaaagtggaaaaagaaagcaaactggcttttgaggaacggaaacagttgaatcgcgagattaagaaagccggacagttagtggagaaaatcgagcagaaaatagcccaactggaggaaagtattgcaagtatggaggacaaattggctgccggcaatgtgagtgatgaattgttgaaggagtatgctgaaagccaaaagcaattggaaaatgccatggacgagtggacgtcggcaacagaagaggtggagcgattgaagggtgagtgtaatgattaagaaatataattaatgatatatggctaaatatagacaagagtgtatttttggaatacgtgccgtgatagaagcaattcagcaggaaaaggaaattgataaggtgatgctgaaaaaaggagtgaggggagagttgtttcagcagttgtttgctatgattcgcgagcgtaatattccgtttcaatatgttccggaagaggtgttcaagccttttgcagacagaaatcatcaaggggtgttggctgaaatttcaccggtgccttatcaggatttgactgaggtgttggatgcggttgaggcagaaggaagagcaccgtttgttttgatattggatcgagtgactgatgtgcgtaattttggtgcgattgtgcggagtgcagaatgtgccggtgtggatgctgtcgttattccgaataagaattctgctaagatttcctcggatgctttgaagacttctgccggtgctttgtatcatgtgccggtatgtcgggtgcagaatttgaagaaaattgttcgggaactgaagtttcagcatggaattcgggtgtatgcggcaacggaaaaagcagagaagtattatacggatgttgatatgaaagagccggttgctattgttatgggctctgaggataaggggattgatgaagatttgttgaatataactacggaacacataaaaatacctcagcagggtcagatagaatcattaaatgtatctgctgctgccgctgtgttgatgtttgaggtggtaagacaaagaagggtgtagttttcttgcaattgttttaagaaaactctacttttgttgaaatttaaacagaaggaatagtatggtgagtatttcacatgttgttgaagatttagtaaaacacagaccttatttgtcggaatccttagctgccggaattatcaatgtatcatcgttggcgagacagttgcaaccttcggtggagaaaattttaatgcgggaggtgaataccggagccattgttatggcattgaatcgattggctccctatttacaagtgcgagaccaagtgcagttgaataagttgttgagtagtatgggtgatattattcttcgaagtaatctgtgcgattatacgtttaaaaattcacctacattgttggattgtcatgttgaggtgttgaagcacttgtctaaaaatgacgagattttttatacaatggtgcagggggtttttgaaaccaacttggtaatcagtgcaactatggagcattggatttcagaatttttccgtaatgaaatttgtttgtttgaacagcggggcttgtcttcagtgacattgaaattgccgaaaggaaatagtgtgcaggccggtttttattatacgataatgaaagaattgtcgtgggaaggcattaacttgacggaggtgatttcttcaacaaatgaatttacggttgttgttgacaatgcattgattgataagacatttgtggtattgaagaatatcggtaaaaaataaaggcgataggtattaaaaggattatataaaataaatacataaagtatgtttgaaaatttatcggaaagactggaacggtcgtttaaaatattaaaaggtcagggtaagattacagagttaaatgtggctgaaacgctgaaagaggtgcgtcgttctttgttggatgctgacgtcaattataagattgccaaggattttaccaataaggtgaaagaaaaggctttgggtatggatgtattgactgctgtgaagcccggacaaatgatggtgaagattgttcatgatgagctggcagagttgatggggggaaagaatgttgaagtgaatattaagggtagtcccgctattatcttgatgtctggtttgcagggttcaggtaaaacaactttttctggtaagtttgccaacttgttgaagacgaaaaaaggaaagaaacctctgttggtagcttgtgacgtgtatcgtccggctgctattgagcagttgaaggtattgggacagcaaatagaggtgccggtatatagcgatgaaagttgtaaggatcctgtgaaaattgctcaggaagcaatcagacaggcgaaagctaacggtaatgatattgtgattgtcgatactgccggacgcttggctgtggatgaggagatgatgcgcgagattgctgcgattaaagctgctatcaatccgacagagactctgtttgtggtggatgccatgaccggacaggatgctgttaatactgccaaggaatttaatgagcgtttggattttgacggtgtgatactgacaaagttggatggtgatactcgcggtggtgctgctttgtctatacgcacagtggtgaataagccaatcaagtttgtgggtaccggtgaaaaactggaggctttggatgctttccatccggaacgtatggccgaccgtattttgggtatgggtgatattgtttcgttggtggaaaaggctcaggaacaatttgatgctgaagaggcaaagaaattgcagaaaaagatttctcgcaatcagtttaattttaatgattttttgagtcagatccagcagataaagaaaatgggaaatatcaaggatttggcatccatgattcccggagttggaaaagcattgaaagatgtggatattgacgatgatgcatttaaaggagtggaggctattatttattctatgactccggcagaacgcgaacatcctgaaattattaatggttctcgccgtatgcgtatcgctaaaggtagtggaacgacagtgcaggaggtaaatcgtctgctgaaacagtttgaagagtcgaagaagatgatgaagatgctttccggtggaagtaaaatgatgcgtagaatgcctggaatgagacgatagtgaatacataaaacaaaggatatatggaacttattgatgggaaaaaaattgctgctcaagtcaaacaggagttggcggatgaggtaaaccgcatgaaggctgccggcatgaaaacaccgcatttggtggcagtgctggtaggtaatgatggtgccagtgaaacttatgtggcaagtaaagtgaaagcttgtcaggaagtgggctttaaaagcacagaattgtgctatgatgccgatattacggaagagcaattattggcggttgttgataaattgaataaggatgatgatgtagacggctatatcatgcagttgcctttgcctaagcatatttctgaagagaaaattttgcaggcaatagacccagataaggatgttgatggtttccatccatgcaatgtaggaaaaatggttatcggactccctacttatcttccggctactccggcaggtattgttgagttgttgcgtcggtataatattccgactcgaggcaaacattgcgttgtgattggacgtagcaatattgtgggtactcccatggctgtgttgatgtctcgaaaagatgaacatgcggattgtactgtaacaatgtgtcatagccgtacgtctaatattaaagagtttactttacaggcagatattttggtggttgctttgggtaaaccacattttgtgactgcagatatggtgaaagaaggtgctgttgttattgacgttggtatccatagaattccatcagataagactaaatccggatttagattagttggagacgttgattttgatgcagtggctcctaaatgttcctatattactccggtaccgggaggtgtgggaccaatgacgattgtctctttgttgcagaatacattaaaagcttgcaagggattgtgattatgttgattaggattggctatatagccaatcctatatttttatttaatctatggttctaaattatatctggatattcttttttgttgttgcttttctggttgcgttttatcgtttggtgtttgagggtgatactgcgatttttggagaaatgatgaatgctacctttgatatgtcaaaaacgggttttgagatttcgttgggattaaccggagtgttgactctttggatgggaattatgaagattggcgaaaaaggtggtgctgtaggagtgatgtcgaaggttattaatccttttttcagaaggttgtttcctgatttacccaaggatagtccggctcatggttctattatgatgaatttggcagctaatatgctgggtttggataatgctgcaacacccatgggactaaaagcgatgcagcagatgcaggaagtgaatccggatacaaaggctgcttcgaatgcccagattatgtttctggtgttgaatacgtccggtctgaccattgtgcctgtttctattatggtgtatcgtgctcagatgggggctgcaaatccgacggatgtctttattcctttgttgatagccacttattgttcaacactggcaggtttgattgctgtgtcggtttatcaacgtattcgtttgtgggataaggttattttgtcttatttatttgttttgactgctattgttggcggagttattggatatttttcttctttggataaggaggaattgacggtggcttcgaatgttgcaagcaatgtgattcttttttctattattatttcgtttatcggtatggcggcatggcgtcgtgttaatgtttacgaagcgtttattgatggggcaaaagatggttttgcaactgctgtcaagataatcccttatttgattgcaatattggtggctgttggtgtgtttagggcttctggcgcaatggatgtattgatgggaggaatcgctggtgtggtagaaggtgtaggatttgatgcggagtgggttgatgctttgcctactgctttaatgaagccattgagtggcagcggtgccagaggaatgatgattgatacgatgacaacctttggggctgattcatttgccgggcggttggcatgtactttccaaggagctacagatactactttttatattattgccgtttattttggagctgtgggaattaagaatacccgatatgcgataccgtgtggattgattgcagatttggccggtattgtagctgctattgttgtcgcttatttgttttttgcatagattatgaagggaaaggttgttgtaggaatgagtggtggggttgatagttttgtcgctgctttgatgttgaagagggaggggtatgaagttgtgggggtgaatttggagttatggggaagcagtgatttgacagacgttcaaaaaatttgtcagcagttggagattcctttattgattcggaggggagaaaagcttttccgagaaaaggtggtggacgattttgtcgaagattatcgtgtaggaaagacgcccagtccttgttgtatatgtaatagttatgtgaaatgggagttgctgaatcaggttgctgaagaaatcggcgcttcgtggctcgcaaccggtcattatatcagaattgtagaggtcgttggtaaaagatacctttgtaaaggtgttgacccacaaaaggatcagtcttattttctctggggaatacctcatcatattttggcgaaagcattaacgccattaggagatttgtgtaaatctgaagtaaaggcttgggctattgcaaatggatatgagcagatggcaaaacggcgtgagagtatgggggtatgtttcttgcggggaagtaattatcgcgactttatccgaaagtatggggattttaatgagttgcccggtgatattttaaatcagagaggtgaagttatcggaactcattgtggtatttgtaattatacgatagggcaaaaacagggattgcctgttgtgaatggtaaatcgttttatgttgttggattggatgtagggcgaaatattgtcatggcaggaacgaaagatgatttatggtgtgatatgatttatttggatagagtccaattggttgattccgatgatttaaatgaggaggtgacagttaaagtgcgtggaataggtttgaatccgaaagggacggcgaaagtggaacttttgtctgataattgtgcttgtgtgcgtttgatagaaccggcatgggctgtggctccaggtcaaccggtcgtgttttttcatggtgatagggtacttggaggaggatttgtttgtcgtaatcttgaattttgaaaaaatattgtcagattttattgtagaattcaataaaaattctttcctttgcacccgttaaaaatacgggtgtagctcagttggtagagcactggtctccaaaaccaggtgtcgggagttcgagtctctcctcccgtgcaatttattctcttgcacgtttcctttgttttatttgaataaatgtattccgcagttattgatttgttggaatgcgaaaccagaagcaggaacctttgccttcttgagaatccaatccgatttctccttctaattgttgaacaatgctgtggcaaatggaaagtcctaagcctgttccttgaataaaattgttgaatttgacaaaacgctcgaatacatgaggctggttttcttgtgagattcccatgcctgtgtcttgtacataaaattttatataatcaccttgacattcatagcttaaaataatgtggccttgtgaagtgaatttttgggcattgttaatgaagttgtttaatacttgttgtatgcgtttgtggtcgcttaaaatatggcactcctttttttctggtttaaatagtagttctacattttgaggtgttttgtctttcaatgttttgattgtgttgcgacataattcatttatgtcaacgggttgacggacaatttccaggatgccggcttcgatttttgaaaggtctagaatgtctgaaataagttggagtagaagttcgttgtttttttcaacgatggcttggtattctgctcgttcatccggatcgtccgtctctgccagaatatttgaaaagcctacgattgcgttgagcggagtgcggatttcgtgactcatatttgcaatgaacgcggatttcagacgatcggattcttctgcatgctctttggcttgaataagcttggcttctgtgtttttaagttcggtgagatcgtaatttatgcacaacatttctataatatgttgttcgggagagtagtttctcacaatcatattcatttgtgtccatccgatttgtccatccggcgacaggactcttacctcttgacgcagttttttgatttttccttgtatgatggagttcatggattggagaagagcttgactgtcatctgggtgtaggtggttatatatgtttatgatttgtgatagtggagtcccttcttcttcgccaatgttgtgataccagctgctgagggcatagccttcgcacgtcagggcattgaagtgggcataaccaacttttgcgaatttgccgattaagctaaagaagtctttgaattcttcaattttgttgtaggctatggtggtttcggttcgatcaatattgattaatagataattggttcgtctgttttgggcatcatgaagagctgttcccttggtttgtatgtttatggttccttttttatttgttttgtaatagccgttgagtttgtcaaagtcatagtgtagtgtaaagtctgcatgtccgcttttttttagtttttctttgatcccttccggcatgatggggttgtcgaaaatgttgagacctaatacagtttccttatttgtgagtccgaaaatctctatttctctatcgtttatgtcaattagatagccgtctttgtcatatagttcaatccctgccggtagattgtggtatatatttcgaagcagtcgttctcgatggtcgagagcttggtgggtggcatatgtttctgtaatgtcggttagcaggcatattaattcatctttttgaggagagaaacagttgcacttgcaatatttctgttgtttttttagataataatctcgctctaaggctttgccactgttgatgatttcagtaaaatctgagagcatgtggtgatattcaaaattgatttcgctgatttttttcccaatggtattggggttggtctcaaagatggagaaaaaggtatcgttgccatctatgagtaaatagtcgattatttgattctcatcattatatattattttcaaacgtaaatagccgataggcatgtgtttataaagattggcgagatattgtttttcagatagggcattttcttctgatcggtgcagttccagacatatgctgatgatattggtgatagaggaaaaccattggtagtcttcatttttccatatatgttgtttgtctgtgatatcaattccggcacagccccataccccgtcgcgggaatacatagggacaataagagttgattttattccttgtgcatccagatatttgtatacttcagtggcttcttctggtaattcattcaaattactgaggataatgggagttgaaaatgtgacaatgcgttgccaccaccaaggaaagataggcatcgagcgtttcatgggatggctgaatttgaaatttttatcatgagcttggtagcgacagatgtaggtgtggtcagtgttgttgtattctgctatgtatattcttcctttagaatattctcgaagaatttcgcttaggatattgttgatagtggtcgttatatcatctgttttgagcaaggcaaataatgagcgggatatgctgttttgatggcaaaacagattattgattcgttgttcggctgtttgttggggcatgctgtcaaagggagtattgagaaattccaagaaaccggagtttttaatgtttccgttggtatctgttttgtgggagcatagtttggagcgtacccactggataccttgacaggtttgcagcggatagatgtggtcgtaaatattttgagttttgccgaagtagaattcgttgaccgtttgtgtcagatattcttggggaattaattgatggaaattgtcaaaactgataatacctttttcgttgagacttaatttttttatgattatgtcggagcatttgtattgttgcttcttgaaatctgcttcccaccaaccaatagaagctttttctaataattccagtatctgttcgttgtcaaagtttgccattgtttcttagtgcttagtttgaacaaatataggctttattttccgttttatatggaaattttgttcatttgcattatgaaaaataagctttttacatcgaacttttgttttattttggcagctaatttcctgcttttctttgctttttatcttctgatgccggtattgccgttttatctgaaagaagagtttatggcagggaaatcgatgattggttttatattgtcgtgttatacaattgcctgtctgtgtattcgtcctttttctggttatttgctggatacgttcagtcgtaagcccttgtatttattagcttattttgtatttacagtgatttttggaggttacatgttaacgggagtattggctgtttttatagctttgcgtattgtacatggatttgcttttgggatggtgtctgtcgctggaaatacaattgttattgatattttaccttcggagcgaaggggagaagggttaggatattatgggctagctaataatatagccatgagttttggaccgatggtaggactttttatgcacaatacatgttcatatgaagttatttttagcagttctttattatcagggtgtttgggagtggttatggccggacttgtaaaaacttcttataaaactccagtaaaaagagaacctttgtctttggatcgatttttgttggtaaaggggattccggcgggttttgctctgttattgttatctattccatatggaatgacaacgacgtatgtggctatgtatgctgatgaaatcggtattaggatatcatcaggattgttttttacgtgtatggcggttggtttggctgtttcgcggattttttcaggaaagcaagtggataaaggtaggattacttgggtaattcagttgggaatgtatatggctgttgttggttttgcttctctttttgtttgtcgctatctgatgattggttttcccattctgacgtctggtttgtttttggtcatagcgttgttattggggattgcctttggcacgatgtttcctgcatttaatacattgtttgtgaatttggcttctaataatcagagggggacggcaacttctacttatctgaccagttgggatgttggaataggagtgggtttgatgttgggaggtgttatcggtcaggctttggatggttttaattatgcttatttgttaggggcaattttaacggtgttttcggctgtattttttcatataaaggctgctccacactttaacgcaaaccgtttgagataattgagaagtttgtcgccgataaggtttaaaatcttttgtgttttatgtctgagaatttaaaattatttgtattttagtggcttctaacgtatagcgaaattttagcatgggattattcggtttatttggaaaagcaaagaaagaaacgttgaataaaggtctggaaaagacaaaggaaagcgtatttaagaaattggcacgtgctgtggtcggtaagtctaaagtagacgatgaggtgttggataatttggaagaagtgttgatttcatctgacgttggtgttgatacaacagtccggattattgagcgaatagaggcaagggtacaacgtgataaatttttaggaacagacgaactgaataaggttctgcgtgaagagattgccgctttgcttaaggaaaataccgtaaatgacaatgattcatttgatttgccgaataacggagtgccttatgttattatggtagttggcgtgaatggagtaggtaaaactacgacaattggcaagttggcttataaattcaaagaagccggtaaaaaagtggtattgggtgctgcagatacatttcgtgctgccgctgttgatcagttggtgatttgggcggaacgtgttggagtgcctgttgtaaaacaaggtatgggctcggatcctgcttctgttgcatatgatacattgaataaggctaaaaatgatggtgctgatgttgtgattatagatacagccggacgtttgcataacaagattaatttgatgaatgagctgacaaaaattaagaacgttatgaaaaaggtattgccggatgctcctaatgaggtgttgttggtattggatggatctaccggtcagaatgcttatgaacaggcaaaacaatttacgttggcgacggaagtaaatgcacttgcaattactaaattggatggaacagccaaaggaggggtcgtaataggaatatcggatcagtttaaaataccggtgaaatatataggagtcggagagaaaatagaggatttgcaagtgtttaatcgagaagagtttgtagattctttgttcaattgatatgaagaagattttatttgtttgcctcgggaatatatgtcgttcgcctggagctgaggggattatgaaagattttgtaaggaaaaacaggcgagatgctgatttttatattgattctgctgggttatatggaggacatgctggtgctttgccggacgcaaggatgcggaagcatgccagtatgaggggttattctttggatagtagggcgcgggcattttatccttctgctgattttttggaatttgatatgatcattggaatggatgaacaaaacattcggcagttgaacttgttggcagaaaatgatgaagaacgggcaaaaatattcagaatgacagatttttgtcgtaaatacgcagaatacaaggaggtgcctgatccttattatgaaggtgctgatggctttgaattggtgttggatttgttggaggatgctgtcggcggattgtatgagtattgtagtaagaaatagatgggtaaaatagcgttcattcagataggaaaaagaccgcagcagacgatttggtttgcctgcggttttctttttgtgctaattgtgttgtggtggaatttattgccgacgcctctgtttgataagccttatgctacagttttgctggatcggaagggtgagattattgatatgcaagtggcagcggatgggcagatgcgttttgaagatatgcatgaattgccggagcggtatgtgttgtcgttactcatgtttgaggataagaattttatatatcaccggggtgttgattggtgggcaattgctagggctttggtcgcaaatataaagaacggtcggattgtgagcggtggtagtactctttccatgcaagtggtgcgtttgtttcgtgataatcctcctcggaccatatgggaaaaaatcaaggagcttgtcctaactatacgtctggaacaaagttattctaaaaaggaaattttggagctttatgcaactcatgctccatttggtggaaatgttgtaggattacaagcggcttcgttgaaatattttaatcgcagtcctaaagagttgagttgggctgaggctgctttgttggcagtattacctaatgcgccctcactgatttatccaggtaaaaataatctgcaactgaaaaataaacgcgatcgtttgttggcaagaatgcataagtatggtattatttctgatgattcttatgagttagccttgaaagagccgttaccggctcatttgtttgagagaccttcgctggctcctcatttgcttgctcgtgcccaaaaagagaaggggggaacggtagtgtcttatatagatggtatcttgcagcgccaagtgaatgatattgttgaacgtcatgcagcgatgttgagtcagaattatgtatataatgtggctgtgttggtggctcatataccgacaggagaggtaagagcttatgtcggcaatagtaaggcgcgtgtaggtagccggggaaatgatgtggatattatccaagcaaatagaagctctggaagtatctttaagccaattttatatgcgatgatgctgcagagtggttttatcttgcctgatatgttggtggcagatatcccgtctcgctttggagggtatgcgccttcaaatttcagtaaggatttcaagggggcagtaccggcttctcaggctttggcacaatcattgaatattccttttgtaaggttgttgcgtgattatacttatgtacgtttttatgatgacttgaaagaattgggattaaattcattgacccgaccagcagatcattatggactgagtttgattttgggtggtgctgaaacatctttgtgggatatgtgcaatttatatggaggaatggcttctgttttgaatcattatggggatgaagatgggcaatattatgatggagaattttcgcgtttgaaattgtggcagaaacgtgattcattgagatgtaagcaaaagtctcagccatctggcattttgcaggctgcagctatctggcaaacatttcgggctatggagcaggtggagcgtccggaaatggaatcgggatggaagcattttgtttctgcattgaatttgtcctggaagacgggaacaagtttcggctttcgggatgcctgggcgataggggtaaatccggattatgttgtcggtgtatgggtgggaaatgctgatggagaaggacgtccggggttaactggagttagggctgctgctcctatattatttgaagtggctggattgttgccttgtcgccgtcgattttatgagccaagagaagaaatgagcttgacagcggtttgtcgaaaaagtggttgccgaccttctgttttttgtgaagagttggattctatttatgtatgtgaaaatggaatgcgtaccggcttatgtccttatcatcagataatcaatttggattctacagagacttggcgtgttacttccgattgtgaatcggtgtatagtatgaagcgtaaatcttggtttgtattacccccggtccaagaatggtattattgtagaacgcattctgattatataaagcttccaccttatcgtccaggatgtaatcctggtaacgaagatgtgatggagatgatttatccacagccgggcgtgagggtttttattcctcgggattttggagcaaagcctggaaatgttgtttttgaagcggtccatcgttcggcggatgcgaaaatatattggtatattgatgataaatatatgggcatgactcaaaatagacaccaaatggaattttggttgcaagaaggattatatagacttacactgacagatcaggatggatgcgaattgaagcaggttttccgggtggttggtaaagatattttataatattatcttggagggactttttttgggtgttttcatgttattattacgaaaaattattacttttgcaatcggttaatgccaatttagctcagctggtagagcaacgcattcgtaatgcgtaggtcgcgagttcaagtctcgcaattggctctgataagggaatttgtttttatgaaagaggttattcattaacctcttttttttaactatgcattatggaagattttcaacacgtagggtacagtaaagaggtcttggaatttgtagctgtttgtaaagagttttgtgattttgtagaaaccgcacctcagatgtctcgtaaagaatttgttttgcgtttgcaaaaatttatcccgttgatttatttaaaaggttcacttttaccacaaagtgaatcagaagaaagtggattgactgaagattttgtgaccgaagatgattacaattatctatatggagaattgcatcgtttgttgggtgaatatgatgagtatcttgaagtatttgatgataatatgcaatatagtgaagcgcctgttgtacactcaatagccgaaaaagtgtgtgatatctatcaggatttgaaaaattttatttcttcattccgctgtggaataccggaagttattggagaagctttgtggcaattgaataacagttttgagctatattggggaaaagcttgtgttggtgtgttgcgagcaattcatcatgttgtttttgaggttcgaagcgaagattaaaaaggatgccatggagaatatgttaaagcaaagcattacaaaggaggagattgagaaattgcctttatttgtatatgatggtgaaattgtggttgtagaggatgaggaacaggtagatgctattgcggaatctttgaggatgaattcacttttgggatttgatacagaaaccaggccggcttttcataagggcgaagtgtataaagttggcttgcttcaattggcaactccggaggtggtttatttgtttcgtttgaataaatgtggtttccctacatctttgcaatctctgcttgcagattctagcattataaaaataggagtcggaattagagatgatatccgtaatttgagaaaacaagggaattttatgccggcttcgtttgtcgatttgcaagaatttgcagaaaagttcggtattctcgataaatctttttcaaaattgatggcaatcatttttggcgtgaaaatttcaaaaagacagcgagtgacgaattgggatgcacctcaattatctgatgctcagattcattatgcggcaacagatgcctggggagcattgaaaatgtatcagcacttggttgcgttgaaagaaaaatcgggtaagttataagagttttaatgtagatgcttatgctgtggttatcagtttgttgtaagaaaaatgtaacttttttgtataaaaaaagcctgaaaagtttggcagcaatataactttttgtacttttgtgcccgggtaagtcctatgcgaccagctcctacagaaccctccagggtcggaaggcagcaaaggtatgtggtcgtagcggtgcgacatagtaagcttaccctttttaaataaagaatgcctctttagctcagctggccagagcacgtgatttgtaatctcggggtcgttggttcgaatccgacaagaggctcaaaaaaataggaatgcctctttagctcagctggccagagcacgtgatttgtaatctcggggtcgttggttcgaatccgacaagaggctcaaaagagaagggaatgtgggagagtgtaaatgctgttatagctcaggggtagagcacttccttggtaaggaagaggtcgtgagttcaaatctcactaacagctctgatagaattgagaatggcgctatcgtctaggggttaggacgtgagattctcattctcaaaacaggggttcgattccccttagcgctacttattgaaggactggttttaagtccttttttttgtgtctgaacttttttatctgattttcgatacgtgcatttcaattgcattttatttgtgctacttttgtcagaaagtagctaattatttttcattatgcagtcttattatatggatccaattgcattcattgcagagaaaaatggtgtaggaaatcaagtgataaagaacattcttgaattattggaaggtggagccactataccatttatagcacgttatcgaaaagagcgtacgggtaatatggatgaggtaggtgttgaggcaataaagaagtcgtatgaacagtttttggagttggaaaaaaggaaaaaagcagtattggagagcatccgtgaacaggaaaaattgacttcggaactagagcgtcagatacaaaattgtgtagacttgcgtgtattggaagatctttatttgccttatagaccaaagaaacagacacgggcttttaaagctagagcaaaaggtttggagcctttggctgctttgttaatgagacaggagcagggtgatatatatacaaaagcaatgcgttttgtgaagggggaggttgtggatgaagaggaggctttacagggggcaagggatattatagctgaatgggtgaatgaaagcgaaggtgcacgcaaccgtatccggaggatgatagaacaaaatgcttttatttgttcaaaggttgtcaaagggaaggagagtgagggtgataaatttgctgattatttcgattttcgagaccctttgaaacagtgcccttctcatcggatgctggctatccggcgaggtgaaagcgaaggaatattgaaggtctctttggagattgatgataataatgctttggaagggttggaacgcatttttataaaaagcgaaaatgctagcgctgagcaagtgcgaatctctattaaagattcctataagcgtttgctatttccttctatagaaacggaatatttggctttgtataagcaaaaggctgatgaagaagcaatccgagtgtttgcagaaaatttaaaacagttattgttagctcctcctttaggaaataagagggtattaggtatagatcctggttttcgtacggggtgtaaagtcgtttgtttggatgaaaccggacatttgttacacaatgaaacaatctatccgcatcctcctcagaaggatagacagaaagccggattaaagattcagtatctggttgaatcctataagataaaggcaatagctattggcaatggaactgcgagtcgtgaaacggaatatttcattcagcatcttcgctttgattctgatgtggcaatatttgtggtgaatgaaagtggggcatctgtttattctgcttccaaaatagcacgtgaagagtttcccgattatgatatcactgttcgtggagctgtgtctatcgggcgacgcttgatggatccgctggcagaattagtgaaaattgatcctaaatcaataggagtgggacaatatcagcatgatgtcgatcagggaaagttgaaagatgctttggaccgagtcgtggaatcctgtgttaatcgtgtcggtgtcaatgtgaatacagccggtaagtatttgttgatgcacatatctggtttggggccggtattggcagagaatattgaaaattatatacgagacaatggtgcaataacaagtcggcaggatttaaaaaaggtaaagcgcatgggtgcaaaagcatttgagcaatgtgccggcttcttgcggattgaaaatgcagaaaatccgctggataattcttctgtgcatcccgaatcgtattatgttgttgaaaaaatagcgcatgatatgggggttggtgtgaaagaattgattggtaatgaagatttgtgtgataaagttgatttgaatagatatgtagatgagcggacaggatttttgactttacaggatatattgaaggaattgaagaagccggaacgggatcctcgtcccaaggctgttgaatttcattttgcacaaggtgtcacaacaatagatgatttgaaggaagggatgattataccgggggttgtgaccaatattacaaatttcggtgcgtttatcgatatcggtgtgcaccaggatggcttggtgcatatttctgagattgccgataaatatatatcgaacccgacagaggttctttatatgcatcaaccagtgacagtaaaagtgattcaagtggataaagcgagaaggaggattgggctctctattcgccagaccgcagattctaaacaataatatatttgattaatatggctgagagaaaggatattttttatgtattaggcatgagttgtgcgggatgtgccgccaatgttcaaagaactttagccggacaagaaggtgttaagagtgctcaagtcaattttgctgcttctacagtgatggtagtgtatgatgatatggttgtatcatttacagatttgcagcaggctgtacaagatgctggttatgacctggtggcagaagatgaggattcggaagatcaggctgtaaagttgcaagaacaagaatatcggcagttgaaatatcgtactgtgggagctgtccttttgtctttaccggtgttcgtgttgggtatgttttttatgcatatgccttatgtcaattgggttatgttggcttttacacttccggtattgttgatttttggccgggggctttatgttaatgcctggcatcaattgcagcatgggcatgcaaatatggatactttggttgccgtaagtaccggcattgcttttttctttagtctgtttaatacgttatatccggaatattggacttcgcgaggactggaagttcatgtatattacgaggcttcttctgttatcattgctttgatattattggggcgtacgctggaacatcgtgcaaagtcgaatacttcagtggcaatacgtaagttgattggtttgcaacctaaaacggttgttcgtattctggaagatggtgtcatgcaggaagtgcccttgaaagctgtacaagagtgggatattttattggtaaggccgggagataaaattccggttgatggtattgtcgtcgaaggagcttcctttgtcgacgaaagtatgattaccggagagcctgttcctgtggagaaaatggaaggtgcagaagtgtttgctgggacaattaatcagaaagggagtttccgttttcgagcagagaaagtgggtagcgatacggtattggctcagataatccgtatggttcaagaagctcaaggaagtaaggctccggtacaaaaaatggtagataagattgctgcgatatttgtgccgaccgtgataggaattgctttgttgacttttgctatatggatgctttggggtggtgaatacgcttttacgcatgctttactcacttctgtaactgtattggtgattgcgtgtccatgtgctttgggattggcaacaccgacagcaataatggtgggtatagggaaaggggctgaaaataatattttaattcgggatgcagagagtttggaacagttgtgtaaagtggatgctgttgtgcttgataaaacgggaacggttacagaggggaagccggtcgttgttgatttgtattggaatccgagcattgatccgactctttacttgccgattttgttatatatggaaagtcagtctgaacatccattggcggaagctgttgtaaattatctgaaagggaaaggtgtggttacctctatgcagggagagtttcaaagtgttaccggccaaggagtggaagcaaggattggcgaacaggtttatctgataggaaatcgtagattattgaatactcatcaagtggcgttttcgcaagtagagttacggaagttggatgattggagtaaagagggatataccgtagtttgttttgctgacagtggtcagttattagcattaattgctattgccgatagaattaaagagggggctatggaggcaatcaggcatttgcaatcagaaggtatacgaatctatatgttaacgggagacaatgctttgactgctggagccgttgcttctaaattgggaataaccgatttcagagcagaggtaatgccctctgataaggctgattttatcgaggaattgcaagcgggaggggctgtcgtggccatggttggagatggaataaacgattctcaggctttggctcaggcagatgtcagtatagccatggggaaagggtctgatattgccattgatgttgcgaaaattactttgataacttcaaatttggatgcgttgcctaaagcttggaaactgtctcgccaaacagtggctgctatccggcagaatcttttttgggcatttatttataatatggtaggcataccattggcagccggagctctttacgcttcgtgtggttttttattaaatccgatgatagcggcagcagcaatggcatttagttcgatttccgtcgtgtctaatagcttgcggattaaagcaaagaaattatagattaaataccgataactatgaaacgttttagaatcaaaacaaatctcaaatgtggcaattgtgttgctaaagtgcaacagccactggatgcaacttctgaaattaaatcttggtctgttgatttaaagagtcctgatagggtactgaccattgaagctgatgaggagcatgctcttgctttggcaatagatatattggctaaggctggctatcgtgcggtagaattgaaatagaaaacaacaggaggcttgtctgttgtcttacaagcctcctgttgtttttattttttcttgaatagattttgcagtcctttgagtacatttccttttagtgccttttctgcttctttggtgacagattttatggcctttgtcaaatctggtttgattttgggttctgtaagtgtaccgctgactttggcatccaggtcaattgtttttatattgtctgaaccggggatagctttcagcatattgttgatttcgttaccaaagaatttgcggtctactgtcatcgaaagagtatagtccaaattgccttctacagattgtttgccatagattgtcacgggattgccggcaaaattggtcttgaaaggttcgacaataatgttaccattttctagcttgaagttgattttcagatggcttatgctgagtctgcttagctcgtcgtttttcaatacgctggccaattggttcatggctggattattattgattagaatgccttgcgattccaaatatcctttaccgttggcggtgttcatgatggggctcatttctttgtccaatattgctgcaaaagtcatggctgcagatacttttccttcgcagctcatagtcataggtatgcttttacgaataaaggtgaaagcccggtatgcttcgtgaatatcaaagttggcgactttcagattgaagtctactgcaggtttttgtggatctgttgtgctgtatttgccgttcaagaccatagaaccattcaacatttccatgctcagattgtttagattggcggtagcattggctaaattgaccttacctttgacatttttgatgtttagtttgtcaaaaataatcgtattgatgttcgttgtcaaatgtgcatctatgttgcggggcacctctaaggcaccttccgctgcagtaggaccgtttgagttggttgagtctggcatgctggttgtattattggcgccggtgcttttcatttgagctaggatgaattcattgatattaatcagattagaattcaatgtaaagtctccttttaatgtttcatttctgaaaatataaggtagatagttagagattttaccttgcaaagcaaagtcggaagagtaaattttaccctttaggttattgagtttcaggtaagcaggcgttacactcaagctgccttccgggatagaaatacctttggggaattggttgtttatcaacagaatattttgaaattcaaggtttcctttagcggtaaatttctcatattgttctttttcaatgtattcgtatttgcctttaaaagtcatatctgtagtcagaatgccttctatagtcaggtcttgtaaaggaattgcttgttttagattggcaaagttaattgttcctttggcaccgccttctaatagtgggttgttggggtttaggatgtttagaaatacatggaatggattgtttgcaatttcaaatgaagctttattcaaagctatttgtgttgaatcaatgcttcctcctggatttgtaacgtgtaagtctaaattgatcttttgaatagattccggtaattgcggatatttgacagaagcattgtttatcaccaataaagcgtctaattgtggaagattgttttcatagtaatctccattggctacaatatttaatttaaagtctccggaggtttgtacatctttcatttcggctaagatgtgtggaggcaataatgataacaggcttttgaattttgtatcgggtgcatttaactgtaagtttactcgataacggttgtctatggcagctactttgccgatcaggtttagttgtaagtcattgatccgtaaatcgtttttcattacttcaaatgtcttgctctttagatcgctggcaatttcagtctgccacatgatattggtgttgttcacccaaacattgttttgttgtctgaatgagattccttttaatgcgagtgataattgtgccaatgtactgcttgccgagaaatctccggccaattgcatgtctattctatcaatgctggcataggtagagttgtgaaaatcgttgtatgcaacgaaaagattaccgatagctatattgtttaattccaatcctttttcattatcggttgattctattggtttcgtttctttttcaggcgtggcggtagaacttgggaaaatatcccagttggcattgccggctgtatcgactttggcagtcaaacgtccatccataagtagaacacgattgacaatgattttgtctccacttaaaagtgattttaaattcaccgatgcctctagcaagggaatggaagctaacgtatcgcatcctgattccatgttttggcggatgcatacatttttcagtgctacattcagattagggaaacttttaaacatactaaggttcatgtcaccgatatgtaattcggctttcatattggctgcagcctgtttttctattagttttacgatatctcctttgaaaaataccggtattgtaaatagaataacgaaaatgagcacaagaattgatgatactataagaataatctttttcataatgtgattgtttatgtcatacacaaatatagagaatatagttctaatctatttaaaatatggttttattttttttagcttatagccggcaagaatattttgtttctccagcacatcgatggagatgtgtccatatttgcgtttagcattgaaaatcagttgtacatcttcgtattctaaataaggatggcgcagtatagctttgaaactcatgctatccatatctgctttttgtataaatgttggatttattgtaaataaatgagcattggagtcaatattaaagtatttcatattcaattctttgagttgattgatggaatggaatcctcctaggcgtttgcggtagcgtataatacgggatgcataatacggaccgatgccgcgtagggctactagttgggcgctatcggcactattcagttcgacactgctttcttgtactgctgatatttttgaaggtcttgtctgtttttgaacggagagaggcggtgtactgtcttttacaacttcaataggagaggttataaaaaagaagtctgctgtttccggcaacacttgacggggtataaaaatgattccggcgattaatagaaggatgataaatgcgccttttctttctgatgagttgaatatcatagttttatcttttgataaattacaacattaaagttagagtaatttatttgaaaaagcaaacttatggttgcaggcaaaaaaaacacttttgtagaaaaaaatattaggtatttgtttgtatttataaaaataacctctatctttgcacccgcaattgagagatagttgtgggacgattcagtagctcagccggtagagcacaacacttttaatgttggggtcctgggttcgaatcccagctggatcacgaaagggaaacttcaaaggtttcccttttttatgtctataaaaaagcagccataatatcgatggctgcaaaaaagcttttttattttttatatttttcaataagacctttgattacatcagcggtaagttcatgtcctccgaggaatggaaatccttcccaacgtacaatacctttcgggtcaattaatatgacatgcggaataccggtaacaccgagagcctttttcatagttgcttttgtatcaatggcactgtagtattcgataacgggttctttcatttgttttaccttttctactgcttcgtcagaaatgccgattacaatcaggtctttcttgaattgtttggcgaattcgtttaattctgggattgctttacggcaaggtccgcaccaggttgcccaaaagtctatcaagataaatttgtcttttagatctggcttggtggaaatccattcttcaacaacaagttccggagcttttttattcaaaaaagaatttgcccataactgttttccgttattggattcttggcaaaatgtctgtaaggagaccatggccaatgcgataatgataataatttttttcatcttttgtttgaatttgatttataataaagtcgttacaaatatagtgaaagtcataagtcgttattcatattgcctattctaatattgaaaatatgaataacgacttgtatctttgtagcctatgaatggatagcttggaggagatgccaatatatttcagtatgtaaataaaaggagtttatgaaaataaatagatgtatgtggtggtgtagcggtaatgtattgtttttactgttactgttgttgtgtgtcggttgtaagacaaaggacagatctcaatctgataaatccggggcgactgttgccatgcggtatgcggaacagattcagatagattcttgtgatggttattggtcggtgagggttcgtaatccgtgggatacggcaaaaatcctgcacacatacatattggtggagcaaggtcgtgaactgccggataatttgccgtcaggcactctagtgcgcacaccgcttcggaaatccttgatttattcatcggtgcattgcagcctgttggttgagttggatgcattggattgtatcggaggggtatgtgacctgcaatatatctatcatccggcggtacgtacccgttgtgccgaaggtagaattgtggatgccggcaatgccatgagtcccgacttggagaaagtgatagatttgcatccggatgcggtgctcttgtctccctttgaaaatagtggcggttatggtcggatagaaaaattgggaatacccatcattgaatgtgccgactatatggaaacatcccctctcggacgggctgagtggatgcgcttctttggactgctattcggtcgcaaacagcaggctgacagcctttttgcagaggttgaaaaaaggtatgcaagcctaaaagctttagtggatacggtgtcggtgcgacctactgtgctgagtgaactgcgtaatggttcggcttggtataccccgggagggcatagcacaatcgggcgtctttatgcagatgccggtgctgcctatgtgtgggctgatgatactcgcagcggttctgttcccctttcgttcgaaaccgtgtttgaccgtgggcgtaatgctgatttttggttgtttaaatataatgaaacggttgataaaaccctcgcttcgttgcgtgctgaatatgctccttatgccggtttccgggcattccaaacagggcgagtatttgcctgcaatacaggtaaagtgcccttttatgaagaaacacctttccgcccggattggttgttgaaagatttgattttggtgttccatcctgaatgccttccaggtgaaacagcacgttattttaaacagcttcatccatgaaaacaaatcgtaattcttccggccggatttggggtattttgctcgcggttatgatattgttcctttttatagccaatttgttggtcgggtcggttcatataccggcagcccgtgtttgggatatattgtgtggggtgccggtggagcgtgacagttggcggtttattatttgggaatcgcgaatcccgcagggaatcacggcgatgctttgtggtgcagctttagccgttgccggactgttgttgcagactgtattcagtaatccgttggcgggtccttctattttagggattaacacaggtgccagcctgggggtggcattagttcttttattgggtggtgggagtattacagccggagctttcacgctttccggtttcttggctgtgctggtaggtgcttttgtcggagctatggcagtgatgggtgctctgttgcttttttctgcctttacgcgaaataacctgatgcttttgataatcggtattatgttggggtacatcacatcttctgccatttcattgttgaatttcttttcgacagcagagggggtgcattcttatatgatatggggcttggggaattttaccggagtgtcttccgagcagttgccgttgtttgttgtctctattttgattggtctgttattgtctgtaatgcttatcaagccgctcaatgctttgttattgggggtgcgttatgccgaaaatctgggagtcaatgtgcgtcgtacccggaacctgctcttgattgcaacaggtctgctgacagccattactacggctttttgtggtccgattgcttttatcggtttggcagttcctcacatggcacgtcttttattggggacttccaatcataattcacttttgcctgtgacgctcttgttgggtggggctgttgctttgctctgtaatttaatcagcgtattgccgggcgaagaaggaatactgccgttgaatgccattacgccagtactgggagcgccggtcattatatatgtgattattaaccaacgaaaaatacaatatttcaactgattatgggaaatcaacctattctttcagcccgccatcttgcgattggctattcacatgggaaacgccgtacaaccgtggtgcataagaatctgtcgtttgattttctggcaggggaattgatttgtctgttgggacctaacggtgccggtaagtcaacgcttttgcgtacattatctgcttttcagccgccattggaggggcaattgctattggaaggccgtccgttggccgaatggacggagcgtgaaaagtcgcgtaaaataggggttgtgcttacggataagacccaggcaggagggttgaccgtatatgaattggtggccttggggcgtcagccgcataccggattttggggacggctcgcagaggccgatcatgaacacatccgtcaggctattcgagctgtcggcattgagcataaagctcaggcttatgtggcggagctttcggatggcgaacgtcagaaggcgatgatagccaaggctctcgtgcaggaatgtcctttgattttattggatgaacctactgcttttctggatgttgtcagccgcatagaggtgatgatgttgctgcataccattgcacaagagcagcgcaagacaattttgctttctacccatgatatagagcaggctctgtcgcttgcagacaggctctgtttgctttctcctgaatccggacttcaatgcggggtgacggaggatatggtttttaacggtagtcttgaccgtctttttaagcgtgagcatatctgtttcgatcgggtgcatggagtctattcttctacagttgtgggaggacggaaagctgtggtacagtctcccgatccggccttggggcattggacagccaatctgcttcgaaaatacggatatgattgtcaggttgctgctgattctgctgcagacaggctcatggttcaggtatctgcgcccgatcatatgcttgcccgtctggatgggcgggagcagatatgtacttcttttgaagaattggcccgttttttatcttgttaataacccttgtttcccttctgcatatctcccgtttccctctcactcaaatatatcataaacatatcacaaatatatgacatctatatatcaaagataacagtcggatatctttgactagtaattgtcatatatttgttttagtcttgtttgggaggtcagaggcgcttgttgagccatttccgtagcggttcgtcataccatttcaggcaaatgtaagcgagcaggatgctgccaaaatagatggccagagctatcggccatgcttctgcgaacggtattttttctccgctccataaccacgcatagaatagatacataaaaggatagtgtacgacatagaccggataggagatatctcctaaaaatttacagacacgggctgttttgttgtcagtggctttgccggatgctccaatccataataataacggaaaaataatcaggatacataccgagtcgtatagtccgtttgtccattgggggttttcattgccgatgtaagggattgaaagcaggaggataatcaggaggctgcatatccaaaaggctcctctgacggcaatgggtttgaagatccgggaaattagcagaccggcacaaaaagagaagagcagacgcaacattcctccggggaaattataatctgacaggctccagccaactcccagatgtccgaatccggacaaattgcacagggcgaaaagcatgagcccgagaccggaaatgcaagcaagtgttgcaagccatctggtggacatcttgcgtataaacaaggcatatagtatattaccgatgtattcgaaaaaaagagaccagttgggtccgttcaggggatacatttcaccgttgcccctcacttccgggcggctgccggggatggcggggattagaaatagattgagtaataaggctaaaaacagcatgctgagcgttaccggagtcccgtcccattgtttttgtccttgaatgataaaggtgatggctcccagaaagactcccataaccaccatgggctgcagacggatcagtctgcgtttaagaaaaccttttaatgttagagatgatttccaacggtcatcataagcatagctgacaacaaatcccgatagcatgaagaaaaaatctactgccagatagccgtggttgaaattttgatcgatagggctggtggcaaaaccttcaaatatgtgataccacattaccattagtgctgctactccccgcagtccgtccaaaagttggtagtggggtttgctgtcggcgtatgaagccgaagaaattttatccatacaatataaatttatgttttcagatagggtgcaaagataaggaatattggttttgtgtcaaaaaatataaaaaaatcacatttgattttggttgtaaataaaaaatattctatttttggaacgctatcttgctagggtaaatttaaatgattaattgattttatttgattacgtgtacacgtaatatataaagaaggataaatgtagtgctagttccctttatactccttagatatttgctgtgaagcaaattattaaacttacatatacatacacatatacaccaaagatcacatccagttaaaggggcggcactacatttttttattatagcaaatctattttatcaaatctttgatttttactgcttgaaaagtcatgtgggctacgcttgattcgtagaggatgccgatggttcccttgtctatcagtgtgaggcaactgtatccccagctttcgccttcatccagaagcacttgttgggaaggagaccaggtgagtccgttatccaaactggctttgatggtgatgtgatggcgtccgcgggtagtgttggggttggaaaataatagcagaggtttaccggtaatgttgtctttggcttctactttaaggaggcttgccatgcataccggttcctgtaatgctttgcggctggaggggtgttctgtccaggtcttgcctaagtcttttgtaatggctacggcacggctgccgccacgattgtcgcgcatattgagcatcagggtgccgggctcgatttctgctacctgtgcttctgtcgtgttggtgcgtgccaggttgtgcagatgccaggttttgccgcggtctttgctatacatgatgccggcattgggaatgcgggtggagtcgataaactgaatggggaatacaagggtgccgtcttgcatggaaattccacgaccggggccttgtagcagaaaataccaggagggattttttacttgtgaggtgatgttgatgggttggctccaggttttgccgtcatcttcgcttttgacgagcatcagttgggctgtttcgtccggagtcattcccggcatggagttgttccaggcacgtccattgcccatgccgtgtgtccatgcggctacaatccagattgtgttcgttttttcgtcgacgaggatagacgggtcaccgactccattttgggcatgtggcaagcctccggtttctccgaatgtcatggcaatgcgcatgggttcccaagtttgtcctttgtctgtgctgcgactgacacctatatccactttttcttgcaggtcgacactgctgttgtagcggatgtcgtatactcccagcagagtgccgcggttggaggtgaccagtcccgggatacggtatgctgcagaaccgtcgtctccggcttgacgtactccgatgcctacgcgtctgggggcttcagcttttccttgccatgcgattgttgccggttgattgtttattaatgcttcgggcagtgtgaatgaaaccttcgattgtaaagaggcttggggcttcatttgtatgcttacccaaaaatagttggtccctttcagtagcggctgctcggagtgcagggtgatgctgtttttgatgagtgtggtctcatcttgtttgactgagtaggaggggtttgccattcttgttttgcctggggtgtggctggaaatatagttggcgggattgaaatgaaaacctttcttttcgggagcttctgtgccggcgtaatataagcggacggcttggatggcattgagggatgattcctgggtgaattgcatggtcagttggtttagcacatctcctttttgtgctgatatgcgcatcatgcacaaaacattgtctgctctgtcaagcaggatgggaatttgttgttctctgacataaagagtgtcgtttgcaaataccgtttgcgcaaataccgcaagataaatgtaaagtaggcatttcttcatagtaaaaaattgtttgtgtgttaattttattaggagacaaaaataaaaaaaagagtcacatttttgtgactcttttttgtggtatcacctggaatcgaaccagggacacaaggattttcagtcctttgctctaccgactgagctatgacaccatcgtctgttttgcgagtgcaaaggtaggtgtaatttttatatctgcaagtttttgacagaaaaattttgaaaatatttttgggtggtaaaaataaatttggctttgttttgctgattattaattatttactctatatttgtcagaatagaaaaatcaattattaattatttttgttgtgaatatttttgttgcaaaactgagttcagccactaccggtgatgatctcgcagcgctctttaaggagcatggtacggtttcttctgctaaagtgattatggatagggaaaccggaaattcaaaatgtttcggctttgtggagatggaggatgatgtggaggctatgaatgcaatcaatgctttgaatgaagcagaatttcaagggcgtaagattgtggtgaaaaaggcgcgagagaaagagaatgaagggcatggcgagcaccgtgaaagacatcgttcctttcaacatcgtgggggtgaaagacgttttaccccgcgtcgtgaacggtcggatgaaagataaaaggctgatgccggtaaatttaccggcatcagttttttttgtattttgttttcagataggcgtagagcactttgtgtaacagagctgcttctgcgcgttctgtgtctggaagatcggcatctgtttcgatggcattgcaggcatcgataatttgttcgtcatgctcgatgaaatccggtgcatgttcttctaagtggaacatgtctgccaattgcattttttcaatacattccaaagccagattgcgggcttggagtatgtgttctttgcgataggctgcaagaaatacctggatgatggaatccgtgaagtagtcgcaaaaataatggagtagcagcagtcggcgtttgtagtgttcgggcgtggccgtttctcctgcaatcaaggagcagagcgcaatataggccagctctgctgtctcgatactttcttcttcttcctggtcgagctccagcagaagggttttgtagagtccgtcagcgtaaccttccgtcatggaggcgtccgacagttggtgatagtattcctggcggttgtccattaaggagtggagtacggcacagaggtctcggcggttgccgttctggctgtgtgtatggatctgttcaagaagttctttcagattattgttcatgattgttctcttcgtttttttcggttgaggtgaagttggtccagccttgtgctttcagttcgaaggtgttgccgtcccgggtagtcatctgataaccgtcgccggctttgcaggtgtggccgatgacactgatgccgggaagggctgtcagcaggtcgtatttgtctaatggagccgtgaacaataattcataatcttcgcctccggaaagcgcacagacggtggcattcatattcagttcttctgccattttgaaggtttgatagtctatcgggattttttcttcataaatgttgcatcctacgcccgagtctttgcagatatgcatgacttcggaggcaagtccgtcggatacgtctatcatggcagtcggacgaatatttttttctcgtagcagttcgacaatatctttgcgtgcttcgggtttgagctggcgttccaggatgtattcgtatccggcaaaatccggttgtgcttctccattgtcctgaaataccaccttttcgcgttcgagtagttgtagtcccatgtaggctgcccctaaatcgccgctgacgcagatgagctggttttcgcctgctgtgttacggtagacgatgtcttcttcgttggcttctcctaaaacggtgatgctgatgcagagccctgttttggatgaggtggtgtcacctccgacaaggtctatgccgtagtgttcgcaggcaaggtacatgccggagtagagctcctcaagactctctaccgagaagtggttggatacagccagggctaccgtgatttgtcggggggtgccgttcatggcatagatgtcgctggcattgactgcaacagatttgtagcctaggtgtttcagcggtgtgtatgtcaaatcgaagtggatgccttgtatcagcatatcggtgctgacaagtactctcttggtgccatagtcaagtacggcagcatcatctccgacacctttgagggtggaggtgtttttgtgtttgatgctgcgggtgaggtggtctatcagaccgaactcgccaagagttgataattctgtgtatttcatgtttggaatattttcttgttatactgtaaagatgctgtcagagcatgtctgccgggtgcatcttattttaatgcaaagatatagattttttgtatgcagatagatatttgaataattttcgtacttttgccttatcaatgtaatttttggaagttagaccattatggacaatattatagaggaagtaaccggaggcgagtataaatatggttttgtgactaatgttgagacagataccatcgccaagggtttgaatgaggatgttatccggacgatttctgccaagaaggaggaaccggaatggttgctggaattccgcttgcaggcataccgcaaatggctgaccatggagatgccgcggtgggctcagctgaatataccggagatcgattatcaggatatcgtttattatgctgcccctaaacagaaggcagataaaaaatgggaggatgtcgaccctgaattgaaaaagacatttgataagttgggaattccgttgacggaacagctggctctgtcgggtgtggctgtggatgccgttatggatagcgtgtcggtgaagacaacctttaaagatacgttggctgaacggggggtgattttctgttcgttttcagaagctgtcaagaaccatcctgatttgattaaaaagtatttgggtacagtggtgccctataccgacaattattttgcagcattgaattctgccgtgtttagtgatggctcgtttgtgtatataccgaaaggggtgcgctgcccgatggagttgtcaacgtatttccgtatcaatgctcagaataccggacagtttgaacgtacgctgattgtggctgaggatgatgcttatgtgagttatctggaaggatgtacggctccacagcgggatgagaatcagttgcacgctgctattgtggagattattgtggaaaagaatgcggaggtgaagtatagcactgtgcagaactggtatcccggagataaggaaggcaaaggtggtatttataattttgtgacgaagcgtggtttgtgccggggggataactctaaattgatttgggctcaggttgaaaccggttcggctattacgtggaaatatccgagtacggtgttgaaaggggatggagcagtgagtgaattctattcggtggccgtgaccaataattatcagcaggccgataccggtacgaaaatgattcatatcggaaataataccaaaagccgtatcgtatctaaggggatttctgccggattcagcagcaattcatatcgcggtaaggtgaaggtggtgaaaggatgtcagaatgcccgtaactattctcagtgcgattcgttgttgttgggtgataagtgtggagcacatacgttcccttatcttgagattgaaaatccgacagcccaggtggagcatgaagctacaacctcgaaaattggcgaggaccagatattttattgcaaccagagaggtatttctacagaggatgccgttggtttgattattaaaggatatgccggagacgttttgaacaagatgccgatggagtttgctgtggaggctcaaaagttgttgcagatcagtttggaaggttcggtcggttagttattaaattgaatgagttatgttgaagataaagaatttacatgcctctgttgatggcaaagagatattgaaggggattaacctggaaatcaatgatggtgaagtccatgcaattatgggaccgaatggtgccggaaaaagtactctgtcttctgtgttgacggggcgggaacgttttgttgtcactgaaggtgaaatcgaatttaacggtaaggatttgttggcgatgccggcagaagaccgggcgcgtgaaggtatttttatgagtttccagtatccggtagaaattccgggtgtaagtaccgttaattttttgaaaacggctgtgaatgagattcgtaaatatcacggagaaggtccttatcctgctggtgattttttgaagatgatccgtcagaaaatggagttggtgggtattgacaataagttgttgaatcgttctctgaatgaaggtttttccggtggtgaaaagaagaaaaatgaaatcttccaaatggccgttctggagccgaaattggctattcttgatgaaacggattccggtttggatattgatgctttgcgtattgtagccaatggcgtgaataagttgaaacgtcctgacaattctgctatcgtgattacccactatcagcgtctgttggattatatcgtgccggatattgtccatgtgttgtacgacggacggattgttaagactgccggtaaagagctggtggctgaattggaggagaaaggatatgactggattaaggaggagttgaggggataaatgtttaaatgaataaacgtatcaatgatatggttgaaaaaataaatgccgattttgcaacgctttttagagaagggtatgcgcagttagaagcgggatgcggtatggggatgaatggcgtgcggaaagaggcttttaagaagtttgttgagttgggtggcattccacataaaaaggaagattatatgtatgctaacctgttgccggtgttcggaaggaattataatgtggtcctgaagtatattccgcaagaggtggatatgaatgaggtgttccgatgttcggtaacgaatatggctacagacccaatcttgacagtgaacggttggtggtttgacggcaattgggtgagtgagttgcccgaagaagtggtggtatgcagtatgcgggaagccagcctgaaatatccggatgtttttttgaagcattacaatcagtatgcgacagcagccaaacaggatggtctggtggcattgaatacggcttttgcacaagatggagtgtttgtgtatgtgccggatgaggtggtgttggaacgtccgttgcagataatcaatttgttgagagcgaaaggtgatctgatgggatatcaacgcaatatgattgtattgggtcgttatgcgaaagcaactgtattggtgtgtgatcatgcgctgtctaatcagaatttcctgatgaataatgtgacggaggtgtttatgggagataatgcccatcttgattattatcaggtgcagaatcagcacatgggagcttcacagattaattcattgtttgtatcggaacaccggaattctgtatttgacagtaatattgtgacattatatggcggatttattcgcaataatatgtatgtggcattgaatggtgaaggcggagaaagtaatttgtacggtatgtatatcatggataaaaatcaagtggttgataattattcatatattgatcatatcgctccacattgtgttagtaatgagctgttcaagggtgtaatggatgattctgctttggctaatttcagtggctgtatccgggtgcgtccggatgcccagaagacggaagcttatcaggcaaacaacaatttgctgttgtctgaaactgccagagtgaacagtaaaccgcagctggtgattgatgcagacgatgtgaaatgtagtcacggagcttctgtcggacaaattgatgaggaggctatgttttatttgcgttcgcgtggtatcggaaaagaagaagcccgaatgatgatgatgtttggctttgcccatgatattattcagcatgtgaaattagaaccgttgcgtgacaaaattgacaatttgattgaaaagagattgcggggtgagttgtcaaagtgttacaattgtatgttgcagtgtaaaaagtaaaaatatataagaccatgtttgatgtagaaaaagtcagagctgatttcccgatattggaagaaacagtgtacgggaagcggttggtatatctcgataatggcgctacgtcacaacgtcctcgtcgggttgtggagaaaatgaatgagtattatctccggtataattcgaatgtccatcggggagtacattttttgagcaataaatgtacggatgccaatgaagaggcgcgagagacggttcggcgttttattaatgctgcgtcggataaagaggtgatttttactcgcggtacgactgagagtattaatttggtggctttttcttttggggaggcttttattggcggaggggatgaaatagtggttacggagatggaacaccatgccaacattgttccgtggcagatgttatgtcagcggaagggtgctgtattgaaggtgattccttttaaggataatggggagttggatttgtcgaagttggatgaattgcttactgatcgggtgaagttggtcggtgcggcgtatgtttccaatgttttgggaacggtgaatcctgtggatgagattattcgtcgggcacatgctgttggagctaaagttttggtggacggagcgcaggcgattcagcatatcccggtagatgtacaggccttggactgtgatttttttgttttttccggtcataagatatatggtccgacaggagtgggtgtcttatatggaaaggaagcgttattgaacgagatgcctccatggcaaggaggaggcgagatgattaaggaagtgcgatttgaaaaaacaacctataatgaacttccgtttaaatttgaggctggtactcctgattttattggggtgataggattgggtgaggcaatcaaatatgttgagggaatcggtttgcaggagatggcagattatgagcatgatttgttgcaatatgccatgattcggatgagagagattccgggaatgcgctttttcggagaagctgcagcaaaatcatcggtgatttcttttgcattgggagatttgcatcattctgatgtagggatattgcttgataaattaggaatcgctgttaggaccggtcagttgtgtgccgagccaactatgcagcattttggagtgacgggtatggtgagagcatcgttgggaatgtataatactcgggaagaaatcgatatgttttgtgacgggttgcggaaggttgccaaaatgtttggcttgaagtgatagatggttggtaaataatttagaatgagatgaaaacaattcaagaaatagagagtgaaatcatagacgaatttgctgtgtttgatgactggatggataaatatgcttatctgatagagattggaaatggtattgaggggatggatgaaacacataaaacagaggataatttaatcaagggatgtcagtcaagggtatggtttcacgctgaaatgaaagatgacctgctttgttttgaggcagatagtgatgcgattatcacaaaagggattgcaggtttgttgattcgggtattttccgggcagaaacctcaagatatattggatgccgatttgaaatttattgatgaaatcggtttgacacagcatctttctccgacgcgttccaatggtttgttgtcaatggtgaagcagatcaaaatgtatgctttggcatttagtgcaaagaaatagtaatgtactgaaatatgagtgagaatataacaaagagtctgattatagagaaattaggtacggtgtatgatccggagattccggtgaatatttgggacttgggattggtgtatgacattgaatttacgagtccggcagaagtgattattcatatgacattgaccgctccgggatgtccgattgcagacgaattggttcagcaggtgcatgatgttgtaatggaagtggatggtattaaggcggtgactgtaaatctcgtttttgaaccgatgtggacgccagagcgtatgagcgaaacggcaagattggagttgggctttgatatttagagaatatagttcagtaatgaaactggatgtattgaaagatattgctcgagaaatcgggttcgatgcggtaggggttgctcctgccgctttgttgtctgatgaggtagaacaagtgaaaagatgggttgccgaagggatgaatgccgggatgtcttatatggagcggaatatggaggtgagggaagatgtggaacgtttggtggatggggctaagtctgtgattgttacgctgacgaattattataatccttggcagcaaccggccggtatccctaaaatagcgatgtatgctcgaggaaaagattatcatcgggtggttaaggaccggttgtttgctttgttggaagagattcggattcagatgccaggagaaaaaggacgttgttttgttgattctgctcctgtcttggaacatgcttgggctaggcgggccggattgggttggcaggggaaaaatacactacttattcgcaagggattgggttcgttttgttttattggggtgatagttactacagcagagtttgagacttatgatttcccttttatggaatctttctgtggaaaatgtaaccgttgtatagaggcttgtcctaccggggccttgacaatgggtaaggtagatgcaagacgctgtatatcgtatcagacaatagaaaataaagatgaatgtcctgttgaattgaaagaactggcaggagattggatttttggatgtgatatatgtcaattagtgtgtccgtggaaccagcaattgactgctcatcgttgttctgcattcatgccttcgggaagaaatatggagttggatgcagaagaatggaagggcatgaccgaagaacagtttgatgaattatttcatgaaactccattaaaacgtgcaggtttagagcatctaaaaaataatttgaagaaaaatcaataaaaagtatgtcaaattgttgaaagtcttaaataattaacatacatttacatcgtcaaaacagtagacatttttttgtgtagctatgaaacgtatattgttgattattttagttttagtaatttctttggattgggtagaagcacaaaaaatggtacaaatacatcttattttttatctaatcttccgcagcgttatcgtttaaatccagcttatcagccggagtataatgcttttgttggacttccggcattgagcggcattggtattaattatttaaatggctcttttgcggcggaggattttttagttaagcgggatgattcggtgtacatgaatgtagataagctctataagcagttgcgtaagcataattttatgatgttgaatgaggagttatctgtgttgtcagtcggatttcgagtgaaaagttggtatgcaacgttggatattactcaaaaagctgatattttattccgctttaataaggatatttttactttcttgaaatatggaaattcggattatcctaatatggatttgggaaaactaggtttgaatgcgaatgcatatttggaagcagctttgggattgtccaaaaaggtgaatgataaattaacggttggcttgcgattgaaatatttagtcggtgttgccaatttacatatgacggattctgaattgggtattaaaactcgggatgatggaactattttgatgcattctcgccaaaatatcaaattgacagcacccgtacatattttgaatgacgagacaggacagccatttgcgatggacgagccgatgaattgggatgatattgattttaatactgacggtataggtgtttctgatatcttgaatacaaagaatcctggatttgcaatagatttagggggtgagtatcaattttcagaccgcattaatttctttgccagtataacagacctaggatttattcgttggaaaaatgaagaatatacctataatttgcaacaggattctgagtttgagtggaaaggtgcagatatttcgggtgctattagtggaaatgataatagtatgaacgacgcatttgaagatatggttgattctttgaaaaatgattttcgtgtgcataatgttgaagctaaatatacaacaatgcttaatacgaaaatctttttaggcacgacttatgagttgaataaaatgtttaatgttggtggtgtgcttagagcttcgttcattgatggaatgttctttccagctttaacagcatctgcaaatgcccgttttatccgtaatgtaagtgcttctgtagcttatacgatgactcggcgtagtggcgctaatttgggtattggtttaactgcgaaattgggaccgcttcagctgtatttgcagacagataatattttggcggttaattatactaaaacaaaagcagtgaatgcccgttttggaattaacttattgtttggacataaagataaaagaaataaagttaaagagaatcagggaggaggagcatctgttgtgcccattgcaatgaaataaaactttttattcaaaatatataaccgaaggtagaggtaaagctggattgcttacttttaccttcggttgttttataatataccttctctaatcttttattgcttttcttttatatctgaaaaataattccgaaatttgagtttataaatagaatcgattgatatgaatgtaaaagaatgggtacagcaggtgattaaaccagctgaaattgaaaaatatttagttaatggaaaggactttattgatgtggaatcaatatggtcgaatttggaaaaatacaaaaatcctgataaaggacaagtgcgggatattttacaaaagtctttggatattaaattgttgtctccagaagagacagccgttttgttaaatgtagaagatcctgatttattggaagaaatgcgggccacagctttggaaataaaaaaacgggtgtatgacaaccgtattgttttctttgctccgctttattgttctaatctttgtgtgaatagttgtgtttattgtggctttcgaagtgataattgtgcagaaaaacgccatgtattgacaatggatgaggtccgtagggaaacagaagctattatagatgaaggacacaaaagattgattgctgtatacggggagcatccacaaagtgatgcagactatattgctgaatctatggggcagatttatgcaactaagcgtgtaactccaacgggtaatggttttaacaatattcgacggattaatatcaatgctgctccgatgagtattgctgatttgcgtaaattgtggcgagcaggtattggaacttaccaggtgtttcaggaaacgtatcatccgcagcgttatgcagaattgcatccagccaatacaattaagggtaattatcgttggcgattatatgcgatgcaccgtgcaatggatgccggtattgatgatgtagcaatcggagctttgtttggtctctatgattggcgttttgaagtgatggggttgattcatcatgctcacgatttggaacgtcagtttggtataggtccacatacgatatcattccctcgaatgcagccggcattgggttcttttgttagcgagaattctccttatttggtgcgtgatgacgcatttaaacgtttggtgatgatattgcgtttggctgttccttatacgggattgatcgttacagctcgtgaacgggcagaattgcgtcgtgaaattatcaattatggttgcacgcaaacagatgcatcaacaaaaataggtattggagcttattcagaaaagaagcagcaggatgaaaatgctgataaagtacaatttactttgggtgatgaacgtagcttggatgaagtagtccgtgaattggcaaatgacggatatattacttcattctgtacagctggttatcgttgtggacgtacgggagataaaattatgaatttattagaaaaaggagtggaaggtaagttctgtaaattgaatgctgtcttgacattccgagaatatttgaatgactatgcttctccggaaacacgcagagtaggcgagcagttgattcaaaaggaattgcaagaaattgaaaggatgcctttctttacagaaaagaaattattgcctacttttagaacatattatgaacgtatagcagctggcgaaagagatttgtatatgtaacttagagttaagttatcatttaattgcatcccggatttgtgaaggtaaatccgggatgtttgtttatgatagtaacgttgcaattaagttgcgggaatagttttttatttttgctgtagaattaaataagtatgatggcaaaatgtattttgggtattcagtataaagattattgtattaattttgggagtagttgacttggcaacaaggtgagaggtcgttattgcaaatgtagcggttgccttgattttcatagtaaatttagttagaatacaagaattgataaaatagcctaggtgatggatgaacaaatactattgaataaattggcatttcgtggaataaaaccaacagcaatgcgtattttgattttgcaagagatgctcttgtcagaagaggctttgtcattgacagatttagaagcaagattggataccgttgacagatcaactatttttcgtacagttacgctttttttgtctcatcacttggtacatggagtagatgacggttctggcgctttgaaatatgctgtatgtgataattcttgtaattgttctgtagaggatttacatacccatttttattgtgaaggatgtcataaaacattttgcttaaagcaaattcatgtacctgtagtcgcagtcccttcggggtttgttttacagagcgtgaattatgtgttgaaaggtctgtgtgatgaatgttctcaaaaaattagccattaacgatgtgttgcattataaagaaaagaaggtttgtcagattcaaaccttcttttcgttttgtattagtctaatacttttttcatttggcgttttgctaatgtcaaaggagcaagggagcaaggtccattgatacaaccaccgtcacaagccattacttcaacaaattgagctactggtttcttcggcatagtcttcaataatgcttggttctttttatcaagtccttcaatgtgttcggtagtgtatttattaccgacagcattgacaacggctgcttgtacaccacctgcttgtgcaaaacctcgaccgaatttggtgacatgtgtgttcaattctttttcgctgcaattagctacatcaatgtcataagctaccatgaaggctcctaattcttcgaaactcatgacgtagtcaacttcaggaacagaatctgcttcgtgacgtttggctagacacggaccgatgaatacgacctctgcatccggatacaaagattttgcatagcgtgctgcatataccattggactgcgagtctctgatacgaatggcttcagcattggagcatgtttttctacccagcctgtataagccggacaacatgatgtagtcatgaatgcttgaccttcttccattttttctaccaattcattggcttcatttgctgctgtctcttctgctcctaaggctacctcaattacatcatcaaaaccgatttgtttgatggctgctaacacctgtcctggtgttgcattgaattgtccatagatggccggagccggaatagcaacgatttttttctttggattgctgagggtcttgaagatatcgattatctttgaacgctccattatggcaccataaggacatgcttgcatacatttaccacaatagatacatttttctttatcaatatgttcaactccttctgcatctttactaatagcctttactggacatacttcttcacatggtacaggagtgtaaacaatagcgtggtatggacaaactttttgacatagcccacaacttacgcaatcttcactgctgatgtgtgctttccccccaatgaaagatattgcattcttggggcagttcatcacgcaaggacgtccttcacacccacgacaaaggttggttacggcatattgagactggatacatgcactacatgcttcatgaactacagataagatgttttctttcatgtttttgttagccattgacatgcgtgcaaattctgagaggtgaattaaatcaatttcctcatcagtgatttcaaaacctaaaatggagatgattttgtgctttaggatgtagcggtctttgtggacgcaacaccgtaccggacgtttgttgcggggacgcatttctaccggaatatatttcactttggtgattaattcgtcctcttttaataacttgacaatccggattaatagctcgcgcttggtgagcatcgcaaaattatcgtacagcatttctaattttatcttttataatttgtaataggatttctttatttacattttctatcagctctccatttattgccacaaatggagttttttcgtttgtcaccatatccaagacacgaagccaaagaaatttcaacagattctttggctttatctgttaacttttctgagacttctgttagctgtgtgtcccccatgatgtagcacatggggccggcacataatttcacttgtatcttttccataattattgaggcctcaaagatagctaatttctacatctttaagatattttgtttctaataaatacttaattttctttacaacgttacgacgaatttcaagttccaccggtaaattcgggtcttgatgagcaatattgatgcgtgtaccgacaataaacgtgattttgtcactgtcgtgcagtagagttgtcaggtcatttgccggtccgtgtgatttttcaggaataccttgtgataaaagtcgttcgactttgctaagtgtaagtattccctcggtgattaggtctatccctgccatataagatatgggtgggagttctttgtctgtgatttcaagactgacagtgagaggacgtttcagttctcgtgcaatgatcgaagctgttgtccctccgcaaaggacctttctcccttgaaaatcacgaactttttctgcaagatatttatctttttcaccatcgtatggcggaccggtacaaattagtagattacgaggagtgcggcgatatactacacaacagctggtatcgtccagtagtttgtaattgtcgtttcgctctgctcgtagcacaattttgtgtgccatgtctttagcagagatatctggatattgttgtatcaattcgattatgtagttttttaccccttcatcccaaccaaatggcattgtattgcttcccattcctgattggcttactccgtcagaatagcatatcaagcggtcttctttttctaatttgaattccgatacccagagaaaggtgtttgctaaatctgtgcgttcaactgcgattttttgttttggtatatctatgagttgtccgtttcgatatagacatattgctgggttttcgtattcaatgacttttgtattgcctcgatagtctgtatctatgatggtaaaagtggaataactgattttgcgcaccatgtcctgtggtaatgtgtttatgatggagagagctgtttgtagaatactctcattcattgctgtgtaattcattgccatagttgctgtcattgttgacagtacacaagccttgatgccgctgccgagtccatcagatagtacgctgataattcgtccctcttcttgtagcttttgtgacataaaacagtcgccgcagaccatattgcttgctttgttcttttggaaacaatctacttcgatgaatacattgtaagagggcatggctatgattttttatttgtcatttttttctgtagcagacatgactgcgcgtaaggttgcatctgtgtaggctgcgttttctcctaaaaggcaagctacttgttgcacggtcgccatgtgtttacgtataacttcgcgtgtttgttctaacatccattcttgacgtacatatggctcgcgtaagtcttgtaatattccaaatactagccgatgcggttgaatattgtatatggaaagaagccatacatgttcattatcacgaatttgacgttctgtaatttctttacctgtatttagtactgagcggaataaatctgtaaatgagcagatattttctaagtccattcctgaaagtccaggagaggcttcgtatattgtttttatttcttctcctaaaatatttgcgcagaaataattcatatcgcttatcttcagttcgttatctacaagtataacacctgtcggtattttttgtagcagtactgtagccttgtcatgtgccaccttgcgcatgtaggatacacacatattttcttctgcacgtccttccagcatagcgagtgcaaaatctcgacatgagtcgtaaccgcaaccgctacaattgagctcgtcttcaggacaaagcttgccaacggctgctaaggcttgctttatttcttcttctgaatggaggggaggcttacaattatctttttgatatagggttgttatatcgatgttttctagcttatccagtggcgtttggtctgcaaaaacttgacgattttcaatgttgtagcgctttagggctaatgattgttgactcagttttgcaggtccgttgatacagcctcctttacaggctaatagttctagaaaaatagaatccttttcacgttttgtatctaaatttttaatgacatccttgatgttactgaggtctgaaaatgccatttttacaacttttttttcttcgctttttatccctggaagcattcctccttctataggatagagggagccttttcctgccgaccatggaacaaatcggtcagtgtctgtcggctgacatttttcaggtaagatattttctttttccaaccaaccttttagatctttgaaagtaatgacaacttcaactaggtcccgatagttgtctgcttcaagttttttgcaaatacaaggacctgcaaatattacttttacatcttctccgtaatgttgttttaatattttggcatgagctagcatgggggatagtatgggcgtaatagcatcaatgtgttctgcagagtatttacggatatattcaacaacaaccgggcaggcagacgaaatatatactccaggagctgcttgttttagatagtcactgacgcgagatgatactaactccgctccaatagctgtttctgatacacacataaagcctaattgtctggctgctgcaattaaatttgcagctttcagaccatcaaattctgctgcccatgatggggcaagagctaatattactcgagggtatttattgaggattaagcgcgcacggctaccgccgtctcgtattttttttgcaccggttggacacacttgtgtacaatgtccacaatagatacacctcttttctatgatgtatgctttgttgtcttctatttgtatggccttgacaggacactcgcgtacacatttatagcagtcctggcagttgtcaggttcggtgtaaataggtctgaggtcaagagctttgttcatagttttgaattttgtgaaactagagattatcgttaatccttagttcttctagaattttatacagactggagagatttatttctttatatgttttgtcatcaatacatagaattggaccttcactacacatatctttgcataagtgtcctgaaaatgttatttctgcatctaagttattctctgcaatatatttacgtatcacttccagatgtgtgttattccctctggaaaaacatgaacttccaagacaaattctgatggtatgcatagttattattttttctgcaaatatagaataaaaagcgatagttcaaacgttttcgaagtctttcagctaatatagaatgatactaaaaaaaccgccttgtttccaagacggttttaaatatagagtctaagttttattactttttagtaatagtggcattcttctttccgaatttttgacggaaatcgtaagaaagcggagttgctacaaatagagaagagtaagtaccgacgattacaccgattaacaatgcaaatacgaaacctttaattgaggtacctccgaagataaagatagcaactaacacaatcaaggttgataaagacgtactgaatgtacggcgtaatgtagagtttaacgcagcattggttgtgtccatatcatcacgtttcgggtatagtttgtggtactcacggattcggtcaaatacaactacggtatcgttgattgaataacctactacagtcaaaatcgctgcaatgaatgcctggtcaatttccaaagagaaaggcaacagacctgacaacaaagagaaaagacctaatacaacaattgtgttgtgagccaatcctaaaactgcaccggcaccatattgccattctgagaaacgtaccatgatgtaaacaaagattaccaataaggcaaatacaacagaccaaactgctgcacgagttacatcttccgcaactgcaggacctactttctgtgacatttgacgatattctgtcaagaatacctcttttgtagttccttctggaatgtattttttcaaaccttcgtacaataaagactcaacttcatcatcaacttcaactccttcgtcagcaattctatatttagttgtgattcttacctgattgtctcctccaaatgttttaacttcaggtgcactaccataaacttctgacaagctttctgcaatatcttctaccaataccggctggtcgaaagttacagtgtaagttctacctccaacaaagtcaatacctttatccagacctttagtgaacaaagatactagacagataactgtaatggtgcctgacacaatgtatccaacatggcgtctttgcaagaaggggaagtgaacgtcacgtagccagtttgcagtaaacggtgtagtgaaacgtacatggtcgttattctttgctgcgcgttccagaatcagacgagtgatgaaaatagcagtgaacaatgaggtgaaaataccgataatcaaggttgttgcgaaacctttgataggaccttctccgaaatagtataagatgaatccagtcaataatgtagtcacctgaccgtcgataattgctgagtaagcttgtttgtaaccttccttaatagcaagtttcattcctttaccgcctctcaactcttcttggatacgttcataaatcaatacattggcgtcaacagccatacccatggtcaatacgataccggcgatacctggtaatgtcaatactgcaccaatggaagcaagaactccaaataagaagaataagttggtcaacaaggcagcatcggctgctaaaccggctccacggctgtagaagaacagcatatagaaaagtaccaacaagaatgcaatgacgaaagaccacatacctgattcgatagattcgctacccaatgacggtcctactatttcgtcagcgatgatgcgtgcaggtgcaggcagtttacctgattcaaggatattggccaagtcctgtgcttcttttacatcaaactgaccggtaatctgtgattgtccgttaggaatttctcccattacattgggtgaagaacatacgaaaccatccaatacaatggcaatacaatgtcctacattttcttttgtcagacgtgcccatgttttagctccttccgggctcattgtcatagaaacaaccgggcggctgccgttatgttcgtagtcttgacgtgcgctgacaactgcgcctccgtccatcggggctttattgtcacgggtagttattttgattgcatgcaaaggtacaacgccattggatgctttcatttcccataataaacgtgcgttacgggggaagctggcttttacttgaggcatagccaatactttattgacagcccctgtatcttgtactcgtgcatatccaatgatagagccgttgggaattacctgaccgcttctgtcaacattggggcttaatacagcaaacaatggattttgttttgcaaactcctcctgattatttaaaagctggtttattgtatcctgtgcagctttggcaatcaaactatttgctgtagtatcttttttctcctcagcaggactagcaacttctgctttttcttctgtttcaattacctcgttggcttttactacgtcacgggctttgtcattggctgcagaaagatattggaaaaattcaccattgtcaaaagtttcaaagaattccaatgcagcagtaccttgcaatagctttctaacacgttgagcatctttgatacccggtagttcaataacaatacgacctgagatatcagctttacgaatattgggctgagcaacaccaaaacggtcgatacgagtacgtaaaatattaaatgtgttgtcgatagcgccttctgcttcttcgcgaatcaccttcagtacttcatcattgttggctccgattttgattttatcttttaattcgacggtcccaaataaatccggggaagctaattgtgcgttcggtgctaatttctcgaatgcttcaccaaaaagcgttacaaagtctttcggactggaagtacgcattttgatagcttcttcaatagcttgattgaaaaccggatcttgggtgttgttggccaaattgcgaactacgtctgcaacatccacttccatagttacgttcataccgccacgaaggtcaagacctaagttgatttctaactccttacattctttgtaagtgtattttgcaatacccaagagattgtaaacctcctgatttgcaatagaatccagatacatcttttccttacttgaatctccttgcgcatactcttttgcggctttttcgatacgattcgttttccaggtaaaagacaactgataaagactcaccaatgctaatgctatggcaagcagtgtaatcgctcctttattctgcattttacaataaattattatattacttaatctctattaatccctaaagtatgattaatgcacaaaagtataatattttttgaaaaaaaacggctaaatcgaattttaagtgcattattttaagaatttaatcgtaaaaatagtgctaccgtttatagattcaaggttaattcttttttgctatagtcaatacatgctttatagcgtacgcaaaaatcgcatcctaatagaccgatgattttccgtttgaggtgtttattatacatttcattcacatagtcaaggtcgatgcctgccagtcggaaattacgtagattgcgtccgcctatgctgagacgttttacttggataatccggacattgttgatttgtcctgatacgcttcccgattgcatggaaatggaattctcatccagcatttgactcggaaaaagtttctggtctgccactgttacagaagctccggtatcaattatcatatcgcctgctattccgtctatatcaactttgactatcagatggtaactgctgtcttcaagttctactagctctatgggaattacagctctgcgagaatgataatccattgcaaaatggcacgcttttttatgttttgttcgtttcatgtttatgttattatacctctgtgcaaaaatagaaaaaccgtcccgaatattcgggacggtttttctattttattgacgcgtatttagaacattttcatgtcatctaatacattcataactgagcggacagcttttgctgatgtttccaacaactcttgctcttctttgtccaatttaacttcaatgattttttcaataccgtttttacccaatacaacaggtactcccagatagatgtctttcatgccgtattctccgttcaacagagcgcaaaccgggaatacacgatgctggtcgcgtacaatggcttcaaccatttgtgcagcagctgcacctggtgcataccatgcagaggttcccatcaattttaccaattcaccgccgccaactttggtgcgttcgataatagcatgtaatttgtcttcttcaattaattctgttacagggataccgcctacagaagtgtaacgtggaagtggtaccatagtatctccatgtccgcctaacaataatgcctggatatctttaggtgatacgttcaatgcctcagccaggaatgcacgataacgtgctgtgtccaatactcctgccattccgaatactctggatgagtcaactttagctgccagatatgcgcagtagcacattacatccaacggattggaaacaatgatgatttttgcattgggagaatatttgataacattttcagttacagattttacaatgccggcgttagttgaaattaagtcgtcgcggctcatgcccggtttgcggggaagaccggaggtgataactacaacttctgaatctgctgtagcactataatcattggttactcctttgatacgagtgtcatataagttgataggggcagtctgccacatatcaagagatttaccttctgcaatgccttctttgatgtcaagaagtactacttcgtttacaatgtctttttctgctatgcagttagcgcatgttgcaccaacattacctgcaccaacaactgttactttcatttttgtaataattttattgttttacttaagatatttcgtgttcaacgaattttgattctgatgccaaacttactacttttttttgatgaaaaccaaatattacagaaaaaattctttaataatcgggttaataaagctaaaattgtttttgtatggtggataatcgatgacgttgaaaccataaataccaaataggcaggactgttcctttgaatacgctggatatggtgatgctccaccaaatgcctgtcagccctaatgcaggaaaggttgttagaaaaaaagccatcggtatgcgggctccggtaaagaaaatgctggtaagggctggtggcgttgtatgtccagttccgttgaaagctcctgctgtaacagattccgtaaccataaatagttgtgaaagtgctaggattttcaggtaattgcctcctgctgcaatggcttccggttcttctacaaacagactgaatatttctttattgaatgcatagaatataattccggcaaagagtccgatactgccggcaatgcctagtgtcagacgatagccttttctgatgcgttcgtaattaccggctccatagttttgtccggtaaatgcagccagcgctgttgagaaaccggctgcagtcatccaggaaatggcttctatttgtgctccaatgctttgtgcggctacgcctactgcaccccaacgggctgctaatgtcgctagtgtaagtgaaaacatggaaaatagcgcattttgcatactgacaggcaatcctaggcgtatgattcgttgggcgcattcttttttgagaggattcaataaacgcattcgtcccaatggaaattgttcgctgaatatacggcgatagaagatgctgtatacaactaattgtgccaaagctgtggctatagctgctcctgcagttcccaaatgtgggaaggggcctatgccatatattaatagcggatctaacaggatgttgacgataagtccaacggcagatgtacgaaaaggcgtacggctgtctccttgtccgttgtatagtccgctgaaagtgttgttgttgaattggaaaaacagtcctggagcgacgatgcgcatgtagttgatggcttgctcggcaatggtggtttcaaaatggaaaagtccgatcaaggccggtgcagctattacgataaagcaagcgtatacaagtccgagaatcgatgatagggttattgcatgactggcataactcgccgcccgtttgtagtctttggctccaatggattgtgatacggtgatttctgcccctattttagtcatgaatgaaagggcgttgcatagccatgtaaagaaaccggctgcaccggctgctgctactgcatcactgcccaagtgtcccagccataacatatcagtcatgctgtaggccatttgtataaaagaagctgatattaggggtacagccataatccacaagctacggaatatgctgccttgtgtaaggtcgtttgtctttgccatgtctgattgagtttttcgcttgcaaaggtatgaaataattggaattgaaaattgaaaattgaaaattgaaaactacttttgtaccattagttgacaaacttaattttacgcatgatgaaaaaaaatgtagccgttatagcaggaggaaattctgcagaatatggagtgtcgatacagtctggtaatcatatatattcagaggtggatggtagtcgttataataaatatctgatgatcttgaggggaagggattggcatgtggaattggatggaaagaattatccggtggataaaaatgatttttcttttactttggagggcgaaaagattgtttttgattttgcatacattacgattcatggaaatccgggagaaaacggtatgttgcagggatatctggatatgatggatattccatactccacttgcagcacgctttgtgaggctattacatttgacaagtatacgtgtgccaattatcttcatggatttggcatcaatacaacacagccggtgatgttgactcgtggacaggtgtatgacaaggaggctgtattggcagcggtcggactgccttgttttgtcaaaccgaatgcagagggctctagtttcggggtgtcaaaagtcaagtgtgctgatgattttgacgctgcaatagatgaggcattcagtaaatgtcatgagattttggtagagagctttttggatggaatagagtttacatgcggtttatacaaggtcggggataaaaaagtagtattccctgtggcagaggtcatcccgaaaaatgagttttttgattatgaagccaagtacgatgctaaaatgtctgatgaaattattccgggacgtttctctgatgagataaccgaaaaaatacaggatatggcttccgaggtatatgatattctccgttgtgaaggtattgtacggatagacggttttgtttgtggggatgaggtagtgatgttagaggtgaatacaactccggggatgactgctaatagtttcgtgcctaaaatggtgcgtgtgatggggatttctttgcgggatgtgattacagaaattattgaagataaattggctaaatctgcaaaataataataggtaggcggtattattctatgataccgccacctacaacatcttcgttttcataaaaaactgcgctttgtccgggtgtgatggaatcgatactttcatgaaataccacccttatccgttcgccttccgggaaaagcgaggcgagttttccttcgtttcgatatctgatttttgctgtcacctctaatccttccggaagagttttatatttcatcagattgatattctttgcataaaatgtttttccttgcaattcatcttttgtgcctaataccaccgtattggtgtccggatggatggctacgacaaacatcggttgtccgagtgcgatgcccaaacctttgcgttgtccgatggtgtagttgggaaatcctttgtgggagcctaagcgtttgccgttcgtgtcaacaaaatcgcctggaccgtatttttcgtgaaagttttcaacatgctcggctaggaatgctcgatagtcattgtccggaataaagcatatctcttgactttctccctttttagataatttttcatatccgtggtcaaaagcaattttccttacttccggtttggttagttcgccaagaggaaatattgtacgtgccagattttcctgggtcagagtccatagaaaataggtctggtctttagaaatgtctgcacctttccgtaaaaaatattgtccttcttcgtagccgattcgggcataatgtcccgttgcaatatattgacagcccaatttgtcagctgtttgtataagttttccccatttgatggtggagttgcagatgacgcacgggttaggtgttcgcccatgtaaatactcgtcaatgaaattagtgataaccgtatctttaaagtcttgacggatatccaaaatatggtgttcaaatcctaagtcttgtgccatacgcttggcttcaaaaagagagtcaacgctgcaacatcctttctctttttccatacagccgcgggaaatattgtcaaaagtgcggtaggtgaccccgaccaattcgtatccttgttcttgcagcaacatagcggctacggtgctgtcgataccgccgctcatggccatcaggactttcttgttgttgtttccgttgttcatgtttttctttttttattcgtcagggtgtaccatatagcgggtctcgctgtgataatcgtctcgttctatctctatatccggttctgtcagagtctgtgcattatttagggaaaaacggatgtattttatctgttttccgcgtgaaagccattgtttttcgtagaatgtcttgatgctcaaaattttatcgtccattccgcaaccgtaaaggtcgtctgtgttgacaaattcggtcagttggttgagacgtattaattcactggtatatgtatagagaaacgggctgtctgtttttaagtgaatgatggcatccggcgcgagtattttctgataaagagataaaaaacgggtgcctgtcaagcgcttgcgggctttggccatttgagggtctggaaaagtaatccatatttccgccacttcgcccggtgcaaatacggatgccagcatttcagcatacatacggataaaaacgacattgttcatacccgcttctatggctgctttggcacctttccacatgcgggctcctttgatgtcaagtccgataaagtttttttccggatataatttgcctaattctacagcgtattctccttttccgcaaccgatttcaagaaccagtgggtgattattatgaaacacctctttacaccattgtcctttgaggttgtaatcgttatggagaatatccatgtgcttgggttgaaatacattggggagagtatccatctccgcaaattttgctaatttgttttttgccattgctgatattatctggactgaatgttatcttttactttttctatacatatacctacatttttaactcctcgtagattttccggtttcattccttgttcaattcgaaaaaggacattcccttgtggaaaaatcactgggtttttgttgatagcctggctcactgtcttcatttgaccgccttctccaaaccaatctccagtgggggtggctatttttatattgaccgtatcatgcagttgctggagagcctgactgcgggtactgataatacaccataggtttgtcatttcaaaattgctggtgtgccggacatatagagtcacttgatatagaccgctatccggaatatgggcattaaattccagaacatggttgtagtcccaattttccccggataattcttgatagtcctcgaaaacgacgtcagaccggcaagcagagaacagcagaataaacaaactgatgatatagcaacctttcatgtgtatatggatgtttagtcgttttcaaagcggatgactgtttcttttgaggtgacaatcatttcgatggtcgaccccatgattagcggatagttgtctgtgacatgtcctgcgggaaaaccgaaagatactggataggtatagtcatctatcacttcatggatgatttcctctgcggtttttccgaaattcaagcctttcatttcagaaaatgtaccgacaattagaccttgaagccgttcgaatctttccgacaatttcagactttgtgccattctgtcgatagaatatagattttctcctacatcttcaatgaagagaatagggctttggtgtttacattccaggctggtggaacgaatgcaatgaagcagagtcagatttcctccggttagctcagcctgtaccgcaccttcacgattgaacggatgacccggtaggcaatagtgagtgactttgccaaaaagaaagtcgtgtagccgttgcatggcatccggatgggtagtcccgaaacttttgggcatcggtgcatgaagactttcaattcctagagtgttcagcttggaatgaaagactgtaatatcactaaacccgataagccatttgggagaaccttggaaaatcgaataatccaattgttctacaatacgcatactgccatatccaccacgggtacagaatatagcacggatatcttccgtatccatagcccattgcatatcttccatacgttgttcgtccgtgccggcaaagtatccatgcacagctgtcgcatgaggaccgataacagggcacaagtcccagctgcacaataaatctgctgcagcggctatataggatgaatcaatagaaccggcgggagaaactaaagctacttggtcgccgggctgaagataaggaggcctgaacatacgcaataaatataaaaggttaattcggtgtgcgaagataagtaattttcgattttcaattttcaattttcaataatttcttacctttgcactttgtaatttttgttgaaaatcaagaaggaactatatgacaaaattcaaaaggaatctgattacgacggcattgccttatgcaaacggtcctgtccatattggacatttggcaggtgtttatgtgccggcggatatttatgtacgctatttgcgtcaaaaaggagaagaagtggtattcattggcggttcggacgaacacggagtgcctattaccattaaagcacaaaaagaaggagtaactccacaggatatcgttgaccgttatcataagataatcaaggattcttttgcagagttcggtatctcatttgatatatattctcgcacaagctcgaagactcatcacgaattgtcatcggcatttttcaaaaagctgcatgatgaagggaagtttattgaaaagacctccatgcagttttatgatgaaaaagcaggacagtttcttgccgaccgttatataatcggtaaatgccctcattgtggcaatgagcgtgcttacggcgatcagtgtgaggcttgcggtaccagcttaaatgctacagatttgattaatccggtttctgctatcaccggcaatactccggaattgaaagagacaaaacattggtacctgcctttagaccaatacgagacttggttgaaagagtggatcctggagggacacaaagagtggaaacctaatgtatatggacaatgcaaatcatggttggataatggattgcagccgcgtgccgtgactcgcgacttggattggggagtgcctgttccgctggaggatgccaaagggaaagtattgtatgtttggtttgatgcccctatcggatatatttctgccacaaaggatttgattcctgactgggaaaaatattggaaagaccctgagactcgaatgattcatttcatcggtaaggataacattgtattccattgtattattttcccggctatgttgaaagctgaaggaagctatatactgccggataatgttcctgccaacgaattcttgaatcttgagggcgataagatttctacttcccgcaattgggcggtatggttgcatgaatatcttcgtgattttgagggcaagcaggatgtattgcgatatgtgttgactgctaatgctccggaaacgaaagacaatgatttcacgtggaaagacttccaggctcgtaataacaatgagttggttgcaatctatggaaactttatcaatcgtgctttggtattgacacacaaatattttggtggaatagtgccacagcgtggagaattgacggattatgataaagaggtgttagccgagattccgcagattatagagcgcgtagaaaagaatctggatacattccatttccgtgatgccttgaaagagtgtatgaatcttgcccgtttgggtaataaatacctggctgatacagagccgtggaagttgataaaaacagatgaagctcgtgtcaagactattttgaatgtctgtttgcagatagcagccgatttgtcaacattgacagagccctttattccgttcagtgcagcaaaattgcgtggtttcttgaatatcgaaccgattgcttgggcaaaaatgggtgatggagtactgccggaaggtcacacattgaatgctcccggacttttgtttgacaagatcgaggatgaagagatacaaaagcaaatcgaccgtttgttggcaacgaaaaaggccaatgagatagccaatgcacaggtggctcctgccaaggaaaatattgcttttgatgattttgccaagatggatatccgtgccggacgtattgtggctgcagaaaaagtggcaaaaacgaaaaagttgatgaaattgacggttgataccggtatcgacacccgtacggttgtttccggtattgcagaatattacactccggaagaggtagtaggtcagcaggtcagcatcttggttaatcttgaaccgaagcaattgaaaggaatcgaatcacaaggaatgattctgatggctgaaaatgctgacggctctttggcttttgttcgtccggataaagaagtaaaaccgggctcagaaatcagataagacttaatactatcataataaaacaaaccggctttaaagccggtttgttttattatgtgttttgttacattttatatcatttgaaaatccactcggtgaacgggtcttttgtgaaacatggaaagcttttaccttcaaagaaatacgttgcattaggtttaaattcttttgcaaccttgatatgctttagttgatttccttctgtgaacattctcgaaacagataaggctgaaacattaagtgttccatgtaatttattgtttcggcatcgcagttcgtatatttcctttaatcctgtaatatttaaatctacaagttggttattgtcacaatataatcctcctaattgtttgcatgcactgacatccaaatgttcaagtttattgttgtttatttcaatccaactcagatatgtttgtttgcttaaatcgatatttgaaataaggttgtcatttaatttcatataaaggtatggtcgtggatcatttcctccgattgaagaattcggggtcgtaaaagttttgctacccatattgatttttgtgattcgattgttttgagccagaagatacccaagctgagtattgctgaaatcaagttcttctatcatattattggcacaattcaggtattttaattctgaacatttccttaaatcaatattttttaattgattccattcacatgtaacagactctatttttatacattgtgttaagtctaactcttgtagtccattgtgagagcaaataaggctagttagatttacatttttggttaaatccaacttggctaatcttggatttccgtaagtattcaatgttacaagcttggggttgtggcttagatcaagcgatattagaccgacaccagtcctattgcctcccatgcaattaagatcttccaattcgggattattactcaaatcaatctcttctattggtttgaatttatcctctagtgtatagcaactcagtccgatatctagcttcttcaatttcggattttgtgttacatcgatacttgatatatgcaaataatgtgcttctaatatttccaattctggattttgcgtaacgtctatttcctgaataccatagttgtcttttgacatactgccattattcattgaacaagcaaaatatctaagtttcggattatgtgtaacgtcaatcgaagagattctattatttgaacagttgagtctttctaatgattcggaaccactaatatcaatactatctattttgtttcctgcacaatagacctctctgagtacggtattctttgatagatctaattttgttaattcattgtgagagcagtcaagtaattcaaggtttacaaagcattcaattccggcaagtgattttattttgcgttgcattatcagcaattcttttactttagcagcctcgcttttttggatgagaccatcattatttgtatcaaaatctagtacccatgctagaaagtttgggtctgtgatttcggcaatatcatcagatacgataatattacattttgcggatattgccggatcttcttttagtgcgacagtaataacagtgtttccgatagaggatgcgctaacattaccgatagagtcaacagtagcaatgtctggttctgagcttgaccaaacaaattcaatattgggatttgtattgcttggaaaaacgttaacgtcaagtttttgtgtttgtaaaacgttcataccaagttgggttggtatgacaatgtttgttattgttgagttgttgtctaaatcttttttgctgcaagctataactatgccaattatggcaagtattaaaataatccgtttcatatttgttttaattgattgttatttatctatggctttacaagtggcactatttaaattatattcttgatgattattaccattcaatgaatatgcgatgaatccgtatgaaataaagttagcattccaaggaaaataaagtgtatcgccatctgcagatattgtcatgtaaccgtacattgctttttgtggttctttaaatattattgctttttgggtgtctgtatcatagcaatatattttacttggaatattccagccactaccggtagagacaaaatataatttgttttgggcagttgatgcacataatgcggcagtattgctaagttctgcatccatatttacagtcgactcaatgacaaaagaagatgaattcattcctatcattcgggatttatttcctacagaagcaagaacgtatagccgtttgtctttgcctaatttgatgcccttaattgcaacgtcaatatcaaattcatggattaatgttattttgtctgttgcaggatctatgtattgtaatttattaccggctccaaaaataatcttttcgccaagaacgaacatttctccatcaaatatacctgccatatcaattgctttttcaatttttccttgcgcaagatcaattggcagtattgctccttggttgagattgtatggattgtaaagtgttacataggctttgttgtcatttgctacaatcattcttcgcacagttgctttgagttgggttgttttttttattttgcgttttaatttgagtgtttgaatgtctgcttcgtaaatgatatcttctgctgtagataaaaaataaatgctgtttttaaacattgtagcgtcatttactgaggcgggaatgaagctgttgtttactgcctgaaattgattttcttttataactccgttctctattacagcaatttctccgtaactcataccttgatcgctttctagaatcaataatggtgtgtttttgtacggaccaacggctgtcagaatataagatttttccgtttctgttttttacttttatattaattatatgtgtgccagaccattctgttgtaaataaatattttaatgagtctgctccctctatcgtctgaccatccactctccaagagcaggaagctacttctgcatttgtacattgtatagctaaaacagctggttttcctaccccaatagtaatggaatcaccctgaacagcttctccattgcatgttattccggaaattacaggcagaggatctgttactcttatagttccaatctcaaattctttttcctgtttatcttcattttgggcgatgacttttatggagtattcgcctcgttctgtaggagtgaaaataaaataggaaccttcccctgctaatttttgattgacaaaccattgacaggtgatagcatttgttgcatcaatagagaattttaatgaatctccgataggtagagatgatgtttgaggattaaaatcgtcagaaatagttactccgttaatggttggaagtggagctacttcgtcattgtcgtcacaagcgaataaaagtgttgtgagcatcagtaaaaataaaacttttttcatgttgaaaattatttaattggttgaagtttttttcgtgtaaaagcaaagtgtgccggaatatctcctgttgttacagaccatttgagaatgccgcttttagaatagcaatgcagcttgccgggtgttacatagtctttggcatcagtgacataaaaatcaccattctcgggattgatggctataccataaggaatcttgatgtttttttctgtgccatctgtgataaaattgcgggtggcaatctcttgtttgtttatatcatatatggcataggtgatagtgtttttatttgtattataattccattcggtactgtaaatatatagagagtctccgcaaatagacatttcgctattagctataggtaattctttgactactttatcggtttgggtatccactatgaaagttcgagaaggtacactgtaataatctcctctagatgacacatatagtaggccgttcttatctatttccatgcgatgcaggttaatggcgacctctatttttttcacttctttgaaattattaagatctatcactgatactgtattgtcgtagtttggtactcgatagcctccagagttggcaacatataatttgttgccgaaaatcaccatttcctcaggttgatagccaactgtacatttcccaacaactttcatcgtggctgtatcgatttttgctacataacccaaacgtgaattggggtcaatttggacaggaccggcataagaactgacataggcaaaaccgtctttaaatacaatatatcggcaattgggaatcgatatttgtgtaatgtgttttgctgtattgacatccattacttctacgaaatgagaacaattaattactgcatatagtttgttcccataaatttgtaaatcgttgcctacatcaccaagttctttgactactcctggattgcgttctgcatagatgttttttgtatatgcacctgtttcataatcaaaataatcgatggtcgccttgttgctccccatgttgccttcgtttaaaaggaagaatccttttatattttctgattgtattccttctgttatatctgtttctgttgaaggaattatttcttcatctgtacggcaagaagcacataagagaaagaatgttaaaacaaacaataactgctttttcatattatcacgttaaacttaaatttaaaattaattccaggcattggataacattgtactacttcatactgctggttgaatatgttgtttatttcagtggtggcacgcaattgtattttgcgtaattcaaatgtttttgaaagtgcaatatcgtgagtataccaaggctgtgcgtaattttcaggaatgttagcaacggcttcataacgttcccctgtgtagatgaaactatagttgacagaccattttttatactctccccctataatcaatgaggcgctgtgccaggggatgtaaggaatttgtccaccataccatggactggttgaatctgtgaaatcttgtgctttttgatacgtgtaagttagatggggaaataagcctacttgtccgaaaagaaaatctccttgaacggcaatatctatgccttgtatctcaacatatcccaaattaatcattgtccatcgaaattgattagatgtaggcatggctatgattttgtcatcaatttgattgaagtaaccgtcagcttgaaatttgatgtgcttaagacagccttttattaaatgaagagagtatgtgaatcctaagttatattgattggtgtattctggattaagatttttgttgccaataaaggtgtagtataaatcattaagggttggcaaacgaaatatccgcttgtaaaatgcacgcagatagaattcttctttatgaaaaggtttccatgaggcaataacggaaggagtgaaaacacttttggtgccggcttctgcttcggaaatgcgagtcttgtctgctgtaaaagtgtgtagtaggctcgcctgaagtttaaaacttccagcttctatagaacttgccgcggctgatagcagcatatagcggtcaggatagacaaaatctataagatttgagttgagtgtattccattgaaaatcgttagatagtgctaaactccattggggatatggagtaaacagttgggcaatggataaataaccctcttgttggcggtagaggttattgatatacattgtcgttatatccagccgaggatcggataaataatgtaagtaatcatatgcatattttccattggctaaaagtgtgtaatggctattgaaagattttttgaatgttccttgtataaagaaattattatcccactgacggtcttgatgtttgaattttcctggttcttcacgtacagatgctccgggatagcctcgctctgaattataataatatatttttgtccgccattctccatctttgatgtttcctgatagggttgtttctatcctcaacatgcgtacatctccattcttgcgtatttcagtggtgtcatagccgtttttgcgagtgtatgaaaatttatatttaccggaggtatataaaaattcagaactgaaagaaagcgaaatattatttgtgagcatgtgttcgtaaagtaatgagggattcgccaatccgaatgaccctgctttgaggcttgcttgtagattgtgtttttttccgggtttaaagctgggtctgcgagcttgcatgtaaatggcactagcagatgcgtaatctttggcagtttgaagtaaagagcttttctgaccattatataaagatatggcttccatgttatctaatgaaaatcttcccaagtcaacaactccgttttgtgcattgcctaattctactccatcgtaaaatactccgacatgatggctgcccatgctgcggatgtttactgtctttaatcctcctataccgccataatcttttatttgtactcctgaaaaatagcgtagggcatctgcgacagaatggacgctgagtttttgcaactcatcatctgctagtatttgtaccggaatgatttctttgtggcaataattagcacgtactaagacttcttgtagccataggtgagtttttacagaatctctgtttataacttctgcttgaccataggtaatatgtcctaataataggggcagaataaataaaatatttactaaaagtctatccatacacactgcaaatcaaatttaaattggatttacagcaaacaatgcaaaagacttttgtaaaaaatgaagtcctgctgaaaaaagctttatttgttgataattagtccattgcccgtagactgtaaatcccctaaagcaaggcaggtcttctgactcgtttctattcgaacgccttcccggtttttatataccagtggcaaagaatgttcgaaaatagatttccttaatgaggaaaccgaaacccacagcagcgggaactgttgccgaatctgacggcattcccttttaatccatgtgtatgcctccctgagaggatactttaggaaccattgcaggcgcaaaattatgaaaagaattttttgtttgtatgtttgttatgatattttttttagagtggtgttgatgttatagtaagtctgtttttagcagagtaaaatggagggacatgatgcaaataatttctttataggcatcaccttcagatggatgtgaatttgtataaaatggaagaagataacttaaaatgttatcttcttcgtgtattttagggagacatttcctgtgtttttaatacagggccggtcgggatgatgaaaagatttatatgtatttacgtttgtgtgtggtgtgtgcgtgtaataaatatcccgtgataaaccagtctgttgtattaaagaacgattcaggaaaacagcttgttttataaacttcctctcccttggtgtgtgctaaatcgggggagtatacgagagtaaatttcaaaagttaccattttgagatatttttttcacaatatcgtcatatatcccttttaattttgctggcgcaagtgttaaaaagatgtttctaaaaaaagaataatggtaaatcatggctatttggagtgaaaatcttaattttgtatttcatttaaataataggtatggatattcatttattaatttaaatagtttgtttaattgtatgaaaagagtatttgctaagacattggtactcatggtatcattgtgcttgtctgcgtttgtggcaatggcacagggtacgattacaggaaaaattgtggatgccaatactggtgatccgctgattggtgcaaccgtgatggttgaaggtacaacacagggatgtgttgctgatgtaaatggagaattttctctccaggtaagcaaaaagggaaatgtaatccttttattcagatttgtcggttatgaatcactgacgaaaacggttaatctgaacaagaatcagaaattgggagaaattcggatgacagaatcttctgtcggtctggatgaagtgatggtaagtgcatcgtatgtgactgccgaccgttcaactccaatcgcttattcaagtatcgagccggaagctttggaaacgaagcttggaaataaggagttcccttctgttctgaaatctactccgtctatttatacgacagacaatggtggtggatatggcgattctcgtgtgactttgcgtggttttgatactgacaatatcggtgtattgattaatggtgtgcctatcaacggtatggaaaacggtaaagtatattggtcaaactgggcaggattgtctgatgtaaccaaatatatgcaggttcagcgtggtttgggtgcttccaaattaggcctttcttctgttggtggtactatcaacatcattactcagacaacggatgctcagatgggaggctctgtatattatggtatcggtaatgacggatatgaaaaaatggcattctctgtttctaccggtctgttgaaaaacggatgggcaatttcgctttcaggttctcgtacagaaggtgacggttattttaaaggcggagaattcttgggatggaactattttgtaaatgtatcaaagaaaatcaacgatgctcatcgtctttcttttactgctttcggtgctccacagaaacacaatcagcgtggaaacaaagcattgattgaagactatcgcaaacatcgtgacggtatccgtatgaatacaagctacggttatatcaacggacaggtggtgccgaccggttatggatataacgaatatcacaaaccgcagatttcgttgaatcacttttggaacattaacgaccattctaacctttcaactgccgtttatttttctaaatctaccggtggcggtaagcgtgtatatggagcagataaaaacagattgcaatatgattatcagaccggacgtccgtatgcagagactagcctgactcccgaaggattgattgactacgaatctgtcatgcgtgacaatgctgcttctgtaaacggatcttctgttgtatttacaatggaaaccaatgctcacgactggtatggtctgttgagtacatatacgaataatttgagtgaatcgctttgtttgaccgccggtattgacggacgttattataaaggctatcactatgcagagattactgacctgttggggggtgaatatttcattgataacaatatcaaataccgcgaaccgaaccgtcagctgtttgtcggagacaaagtgaactatcacaatatcggaaatgtgatgtggtggggtggatttgtacaggctgagattaccaaggcattgtattctgcatttatttccgcatctgtttccgaccagtcataccgtcgtaaagacgaaggaaagtacggtaagtacgcttcaaacaagaatttccctgtcaccacttcttggcagcactttgtgccaatgagcgttaaagccggttttaactacaagatcggaggattccagaatgtatttgtgaatgccggttatgtaacaaaaacaccgttgatgaacaacgtatttatcaataacaccaacgaagtgcagaaagatgcaaaatacgaaaagattgttactgctgaaatcggttatggtttgagtcttgaaaaattcaatttgaatctgaacggttattacaccaaatggatggataaaagtgtgacgaagagcatcggtaatgaaaaagctacaatcccgaatattgatgccatccatatgggtatcgagctagaagctgaatacaaaccttgctctactttggatttcaaagctatgttctcattgggtgactggaaatggggagatgatgtattgttcgacctttacaatgaccagcaggaactgattggtagcttcaaggcttatatcaaagatctgcacgtaggtaacgcagcacagactacagcttcattgatgggaacttgggagccgctgccgaaattccgcatcggagtggattggaactatttcggtcgcaactatgccgacttcgacccgacattgcgtaacaacgcttctgaccgttctcaagcatggaaaatgccggaatattcaacattggatgctaacgtaagctacaagttcaaaatcggtaaagtaggagccaagttctattgcaacgtcaataatattctggataaggaatatattgcggatgccaaggacggttctgaccattctgcaaaatctgcattggtctatttcggtaatggaatcacttggtctaccggtttgaaaatcacgttttaatgaataaaatcagattattatgagaaaattatatactggaatattggctttgatgatgctgggggcttgtaatccgatggaagatatttatgatgaactggaccagctcgaaaaacccatcagcaaagagttggaatacactttgactgatgcagactatggcactgtcgcaaaagaggcctataagttgaaaacgaaacaggattctgctgctgccgattatatcaagaaaaacaaagcgttttcagagcaatacggagctaatcaatatcttggaggtttgttctcttctctctatccgggtttgaaagacggttcgtcagtaaaggcaacttataatttttatgaaggtgctttccctgatgtagaaaaggtaacattgggcatcaaaaattatcagcagggtggcaaggatattgcaaaatatctgtgtttgagtgaaaaagaggcttccggtcgcttggatagtgccttggttggtctaaaactggaggataaggcattggcactgattacctgcaaagtgactgccgaccgttcaggaaagacagaaaatgtatttgacttcactatggacaaatacgactatcagatattggtggatgatgtaaagaaaaattataaggaatggttgacagataaaggcgacagtgaattctattatggtgcaagttcctataacaagaatttcagtgccaagaaaaaggattgggaaaagtataataaaggtgttgtgattaccgatgattttatcaccggcaggattcgtgaaggtgtcgaattgcttttgaagacaaaattcaaaaaggacgcagttgcaggtgtagtctataatgtgcgttacagtgtatatgacaataagaatcttccgacccaaatggctttcaaatgtaccaaggctgatggcgctcctgaatttgaatttgtggaagacattgatgctgtggaaacttatgaggtgactaatttgtatgaatatagcaccaagtataaaaactatacgattgtaaaggagactcaaggctatgttgtgagcgatgaggattttgatggaatgggcatcaaggatcatagtttttcgtcttctaataattctaaaaactatttgcctcagttcttgtcattgaaattcccatatgcacagccgggagcaaaatgtatcgtagcctataaaaatgacaatggtaaaaaatattcattctataccgatgaatatacctttacggatggtgtatggacagcctataatccgacagttgtaaaaaccgatcagtttatttttgcaaatggtgcctggatgttcgacccgtcagtacgttttactatggtgcaggaagattatcaggtactggtggattgggtagctgaaaacaaaccggcttatcttgattcgaaatatcctgaccagacagaatattggtttggagcaagctcttaccaaaagaatttcgatatgagaatttcccgtacaactaaggacccggagggaatattgaaggataagagcgatgaagaggttaatgccattttgttggagcaggtgaagaaaggtatcatcgtattgttggaaactaagttcccggatgccgtggcacagaaggacggaatggatatgtattacaaggtaacctatcaaacttttgatggtaatcgtaaaaatttcatgatgtcattcaaatgcattgataccggtaagtttgaatttgccgagggaccaacacagctttgatttgtaggtgcttgaaataaatttcatgctgttttaaaggcatgtttggaggattgtccggggagggcaatcctctttttgtatcatgctcttctcccgctcatccctctcctttctcccacttattcttatctcaaatatatgtcaaatataagacaactatatatcaaagataacaaaacgatatctttgactactacttgacatctctttgagctgtatttggatgggagcattgtccttcatttatacaatttgataaaatagtagtcgttatttcttgagatttaatggcatattcagaaattcacaaggttatagaactattaaatggtaaattatagagtatgaacaacacttttaagaagtaaattggaaaagaaaattgcagacgcttgtcgactggatttggaggcaatcagaaagtgcattgcaaattattccctataatctattgtttttttggatattaaaatgaaattgtattaatttgcataagcgtcttataaatacagcagcaatgaaatatccgataggcatacagacatttgaaaatatcatagaggatggttttgtgtatgtggacaagaccgatatggtctattctctggcaacggagggtaaggtatattttttaagccgtccccgccgttttggtaagagcctgcttttgtcgacgttgaaagcctatttcgaaggtaaaagggatttgttcaagggtttgaaaattgaaagtctggaaaaagagtggcacaagcatcctgtgtttcaccttgatttcaatggagtggattttacggcagttggggctttgcaaatgaaaatagagggttatctctacgattgggaaaaagaatacggtattgttcccgaagtggattttaatcaggcctcccgttttgaaaagattgtccgtgccgcttcaaagcgttatggccgtcgtgcagtggtgttagtggacgagtatgacaaacctttgcttgatgtattggatatgaatccggaggtgttgtcagaaaatcgggagatgcttaaagccttttattcggtattcaagctggctgatgaatatctgcagtttgtttttctgacgggagttacaaagttttcacaggtgagcgtattcagcggtttcaaccagccgaaagatatcagcatgatgtcgaagtacgatgtgttgtgtggcatcacggaggaagagttgcatcattattttgccgagcctatccgcacgatggcggagtttgaaggttgcagtgaggaggtggtggctgaacgtttgaaacagcgttatgacggttatcatttcagtgtccggttgacggatgtctacaatcctttcagtgtattgaacgcattggatagccagcgaatcgggaactactggtttgcaacggggacaccgacttatttgattcgtttgttgaatcattttcatgaggggatagacgagttgaccgggaaatattatacggaagatgagtttatgagctacaaggcggatgtagaatgtccgctgccgatgatttatcagagtggttatctgactatcaaggagtatgacagacgtcgtgaaacattcttgcttgactttccgaacagtgaggtgcagggcggttttctgacgatgatagcttccaattatttaaagacccgcaacgagccgttgaacgtggcgcagagcctggcgtttgctttggaagatggggaattggaaaattttcgtcagttgctgacctccttttttgcagatattccttatacgatgcgtcgcaagaacagcgagcgggagagggagcgttattttcagtatacattttatttgttgcttcgtctgatgagtatctacacggtgcatacggagcgcattcaaagtgagggtcgggtggattgcattgtagagactccccgtgccgtctatatatttgagtttaaattggatggaagtgcagaggacgctttggcgcagatagagaagaaaggttatgcccgtccttatcaggtaggaaacaggcaggtgtattgtatcggagtcagtttttcttcacagaccggaacgatagaggaatgggatgtaaaagagtagtagcttattgctcaaaacttctggttttggggctaacgttagcttttattttatagacttttcgaaaatctggtagaaacaattgattcttttgttgttttttgcaataataataagaatctgtgagtaagggggggggaaatcttttgttgaatgtcggtccgacagcacgcgggacatttgatgctcgtgcacaggaacggctaaagggtattggagagtggatgtgtgtgaatagtccgtctatttatggatgtacagaagctccagaagaattcaaggctccagagaatacagttttgacatataatccgaagactaatcgtctttacattcatctgttggattatcctttagaacgtattcttttagaggggtatgcaggtaaggtgaaatatgcacaatttttgcatgatcgctcagaattaaaatttggtaaagctccttttagtataacttatcaggaagagttgaagaaggaggatctttctttggaattacctgttattaagccaaatgtagatattccagtgattgaattgatattgaatgaataagaaatataaagaaggtgtgtcacacaccttcttattccacaatccattgctcaagatttctggttttggcacagaagttagctcctattttatagacttttcgagggtctgtttcaaatggtaaagcgtattgctttttattaatttgttgcagggcttgttcggcagtaccatccagtttgaattccatgatgtagatgtatttgtccgtttttaccaataagtcaatacgtccttgagatgtatgatattcggcttgtgtgtaaaatcctaataatttgaatatgataaagaatacgttttggtagtgaagttctaaatcacgtactagttcgtagggagtgtttgcaaaaaaactttgtaagcgatgcatgaacgaatcaatattaccatttctgacttcctgtgtaataagcaaattttaaatcgacaattttcggaaaagtaaaatcgacacaaataagtcgagacaaaatgttaataatatcaattaaatactatagccaaaccctatttaaaggggattatccttattctttatcattgtcaaagatggattttctatttcccattctgtagctttgtccagagagtttaatgacttcacaatgatacaaaagccgatcaagtatagcagaggcaagcacttcatcatccagagtttttgcccattcagtcggagccttgtttgttgtgattatcaaggacgctttctcatggagagtgttgattaggttaaagaaacccgctgcatcttcttttttcacagggaacagcattatatcatcaatggcgacgaggtcagctttcaacaaacggttgtaggcagtcatggcagatggcatcagtgttttcattttaatggtgtttataacatcttccatcgtaaccatgtatgccttgtaaccttgcgataccgcttcatagacaagtcctgccgcaataaatgttttcccggtaccggatggtcccatgagtatcagattgtaattctgttcaagccatccgagatgccttaattcacgcagtcttggtgcggttatgccttgtgagtaattatggtcgaaaaggtctaggtcgtgtcttgacggcagagaagctgcttttagtcgccgttgtaagtctttgctatccctttccagaacttctctagcaagcaaatcatgtaaaaattcaacataggtcttgctctgttcccgtgcaatatgggcttcggattccaataacctcggaagggcatacaagcgtaaacgcgagcataaatttttaatctgttcgttcattatcatataaaaaaggtattgaatgttgatatgtctgttttatcgggcaccatggaagaggtatcggaggatgggaccggctctgtttctacaggaacttccacaagggcctctcctttgtggactctgatactttcggctactttcatcaggctacatccattaaagaccttcacttccaaacatcttgtaaaggcttctatcaacgtgggttctgtatagaagggatatcggagaagtataaactgcaggttgtctctatagttacgattcttatgaatgcgtagttcagataaataggtatcaatgaccgtatccccgggaagtcttttacggacagtagcctcgtaatcatccaaggcagcttcacggtctcgccgatgtgaggtattacttattaactgtcctttatctttgcagattttgtgtgctgctatatttttccctgtttcaaggctgtaaatatacagcatctcttccttttcttccagatatacctgtgttcggtgaccttggtaggtacctgtaggaacactgtaatagttccccttgtaggtaatcacgttatccttcctgacatgatggggtaaaagctttggggaagggattgtcggaattccccgataaggcatgagatggggtcttcccatctcgaactccactgatgggatacgacgtatgccatgatgctccataccgttagcagtacgttgcaaccatgcttgaacctcctcgttgagttgctctatggaggtaaattcacgtccccggagaaaattgtactttacgtacttcactacgttctctatctttcctttgctttcgggatctgatttacggcagaacaccggctcgaacccatgttcacgaaccaaggctcgaaagccgtgggtaagtatcaggtctcctaggttctccttgacaagaaaaaccttgtcctggtcataaactattttccgaggtactcccgagaaatattcaaaggcaagttcgtgggcataaactgcaagatcggtagtaaacggggtacggctgaaataaataaatttataacggctacggctaagactcattgcaaaaaaatatactttcaagggtatgccttgcgaagtcttcatccagcgttctccaaaatcgcattgggcatattgaccataaggtgtttccggttgcttctcataaggacggtaactcttttccaattctttgggcagattatgattcagacgtactcggttgacaaagttggataccgttttagctgtgacatggggaaggtctgtaaaatgttcccgtaaacggtcatggagttgcggagatgacaaaaatggccatttgcgtaactctccgataacataagcttcataatcatcaagtttatggctgtatcggcgctcgtaactttgactctgcttaaactcttcttctgtcatagacagatacttggacaccgtttgacggtgaagacctaatgatatgcctatttgactcttgtttaggccatttgaaaataattctttaactttgtaccacattagatacttctgtaatttggaagtctcactcatagcattgtgattagttgttgacaactctaatttacaatgctattttcttttattctattgtcgattttacttttccgatttttgacgatacaaaattaccgattacattcctgtattaagtgtacaatttctgcggatgattctgatttttgaatagcagtatagtatggtagaagacaacgggtaaatccatcctctacttcgcggttgggaaatccaagagtatatgtcttgaattctgtattatatgctttgatagttaggtagccgctttggtagagaatagggataggattctcttccataaagtctatccctcctaaagcatctgcggttactattgtatttgttaattctgtaagaggatatttatttttttttaataattcgatcaggaatatcggcgtgccggtttcaaaccaataactgccaaattcagactgtttcattacttggagtatactgaatggattgtagataccttctcctttatttgaaaaatggtagccgtcataccactctgcgagttgagtctgaatttctttaactgttttattgtgtttgcttgctaaatctttgatttcttctgataagagggaaagcaattctttgtgggtaatgccgcaaagtgtttgataattggattgtagagaaagatcttcaaggttatttaaatcactgaaaacacttattttgctgaattttgtgactccggtaagcagggcaaaacggatataacggtcgctacttttaagtactccgtagaatgctttcagggtgttgcgtaaatcattttgcagagtttcgtttccgatagcttgtaggagcggtttgtcgtattcgtcaattaaaatgacaactccacgacctgtcttttctgcagctcgttggatgattcctttaaaacgcaaggagtgagtggtttcactagaaactttcccatattgtttttcccaagtacataaggcatcatttagtatggcatccaatcgttcgggagtatcatatttttctgcatttaaatctaagtgcaatataggatactctatccatttttgctctaatgtttccatggtaagtcccttgaatagttctttttttccttggaaataagcttcaatggtggaaataagcaggctttttccaaagcgtcgtggacggctgagaaaataatatttaccagttgttgccaattgataaatcagtgccgttttgtctacgtaaaagtaacctcctttacgcaaatattcaaagttctgtattcctattgggtagatttttttgttcatcatataggtatgtggtatagctattggtgtttacttatcatatataatcttcatgtccctttccttgccggctttgaaaaagcgggccggtatgacttcccagtcgtggcggcagctcggggtaatgactttttgagctttgatgtattctgtcaggtagtaacgtacatctttgtcccagattttttcgatgcggttgttgatctcttctttgcttagtcccattccgtgtgtgaggtgaccgcctccaccattgcctcggtaggagttgatggctacggtataggtgctgtctgcatgaaagggtctgccgtcagtgaaagatttgatttcaatacggttgcctggctctttgctgacatctacagtgtatttgataccggctgcgcacgaataattgtagaacggagctgctaaccgtgactcatttttcttgaaatgaagaaggtggtcttttttagacttcatcgtgttgtattgcaggtttgctgcatattccagatagtcgtcaatttctttgccggtgaatttcatgaggtaaagtccgttttcaaatttatagaggttgaacatgtcccggatggttacagtgcctttgtcaatttgggcatccatttgaagaattgtgctgaaagaaaggtcggcacctgttgtttggagttgggcttcatggatgaagtctgtgaatgctgacggaccgaacagaccatcacggcaagaaagcggtgctgtgaattctcccaatggagtggagatgtatttttttacagtttcgagagccggggcaaaggtggcaatgaaaacagagtccggttggtatttggcagggttgaccatttgtgcctgatagtttttggtgtaattgtctccactgcgtttgaggatgacggttactttcccgacggcattacaatgggagcgggagtcaatgaacagaactttatgaccggcgtcgttggtgatctcttctattttttctttgtggtcatgaccgcagaagatgatgtcgaagccatctatctgttgggctaccagatagcttgcgttttcgttgcagggagtgtccttgctttcactggagtaattatagtcatagccggcatgaaacaatcctatcaagagatctggattttcttgcttttggatgatgggcacccacttgcgggctgtttctatcatgtcgttaaattggatgcctttccataaatgagtaggcaaccatttgggaattccgggggttatcattccaaggatggcaatttttatgccttgccgttcaacgacggtgtatggctggaaatagggttcgccgttgtctgtgcgtacggcattggctgcgagccatggaaactgcatttcacgtttcactttgtcatagaccggatggccggcttctatgtcatgattgccgacagcggcagccgtatagcctaagtagttttgtacttgtgctacgatgttggtctgggtggtgtcgatgaagttgaaatagtagttggatggttggccttgcaaaaaatctccggcatccagtaggatatagtcttttactccggtcttgcgttcttcttgcaggaatccggcaacatgggctagactgtggcgggtgggcctgttttgttttaagtcgaaatcaaagatactgccgtgaacatcggtagtacagtagatttgcagggttgcattgtccggtttgccactgcaggcactgagagcgatgagtgctactagtaaataatacaaatttgtaaatgtccttttcatggattttgaattcttatatttaaagcagcaagatataaaaaaagttagtagagtatgctgttttattaatttttagctaacttgcgcacttaaaagttattatattatgaacggtacattaaaaaagatttgttggttgctcccggccttgttggtcgctacggggggagttgcatttgctgaggctggaagcggaatatcttcagcgacagatatcgagagtaatatctcttttatgtctattttgcgcggcttgttgggaattttttcattggtagccattgcctggttgttcagtaaagaccgaaaagctatttcctggaaggtggtaggtattggtttgggaatccagttgttattggcattaggtattttgtatgtgccgtttgtgcaggctatatttgaatttttcggtaagatttttatccgtattcttgattttacacgagatggtagtgttttccttttgggggatttgatggatactacgaaagtgggatatatctttgcttttcaggtgttgccaaccattatattcttctcggctcttacttccctgttgttttatttgggtattatccagaaagtggtgtatggcatggcttgggtgatgactaaattgatgaatatttcggggatggagtcgttatcagtgaccggtaatattttcttggggcagacggaagctcccttgatgattaaggagtatttggatgatatgaatccatcggagatttttttggtgatgacgggaggtatggcaacgattgccggaggtgtattggcagcctatatcagtttcttgggaggagaggatccggtgcagcgtctggtgtttgcaaaacatttgttggctgcttctgttatggcagctccgggagctgtggtgtttgccaagattctggtgccacagacccaaaagattaacaatgatattcaagtttctaaaaataaagtcggaaagaatattttggatgctatttcgaatggtgcagctgaaggtgtgaaactggctgtgaacgtagccggaatgttgttggtgtttgtggcattcattgcttttgctaattatttgtttaccaaattcggtagccttaccggcatcaatgagtggattgcagaggtaacagacggtcggaatacggaattgagcctgcaatttatgttgggatatgccatttcgcctttgatgtggttgattggtatcgccccgcaggatattgtatatgcgggtagtttgttaggtcagaaggtgattatgacggagtttatcggttacgtggatttggcaaatttgaagagtataggtgcttttgctgagacgaagtcgattatcatgtgtacttatttcttgtgtggttttgccaattttgcttctataggtattcagataggaggtatcggtggcttgactcccaagaacaagcctttattggctcagtttggtatgcgagctttgttggcaggaacgttggcttcgttactttcagccactgttgtcggtatgattataggataggaggattaaaagagtgaacgtgtttgtggacaaggaggaattcataaaacacttgcagcaacatgatcagaaagcttttaaacagtttttctataattggcatgcaccctaaaagttggacgttaaattaaatttgattattcaactctctatagtagtgagctcggtattgtgccgagctcctttcttttaattaagtttttattttttgtactcatattttatatgctagatgtaagtgattgattgtcttgctatttgtggaatatgtgtagcgtttctttttataggaagaatatatgtgatttaaagatttatcatatctttgcagaaaagggtagaaaatggatgcaacgatgcaagacaaagcagaatatatagttattcttataaatgaatttgccaaacactatgctttgacagatgtgcaagcgtataggtatttgaatcgttataaggcaattgattttattgaaagtcagtatgaggtagcacatacgcaaagttttgaagacatcgtacaaagtatggcagattattgtcgtcgccggggaggggctatccaatgaaattataccatggtacaaatatggattttgatgtgatagattttttgggacagaattggcaattgaacatttggtaaaggtatgagtgatatagaatatatgaatgagtgcatggcccgggatttagtagttatgttgatggaagaacaaggtttttcattgcacgatgctttggattgcctttacaattcagagatctacgcaaaattaaaagatagcagagcagacttttgtagaatgtagccatttttctttacggatggcatacgtggcgatgaaactggggatggtggctagcataatccaaatgaagaaggtttggtagctggtcatttcttgtatccagccggatatcatgcccgggagcatcatgcccaatgccatgaaaccggtgcagatggcatagtgggcggtttgctgtttgccggcactgaacagcatcatgaaataggtgagggaggtgaatccgaagccgtagcccagttgttcgatggtgacacaagtggatatccaatatggattttcgggacgtacgaaagcaaggtataggtaaacgaggttagggagattcatggcacaggtcataaaccacaggcttgaaaggaagcctttacgggcaatataaatacctccgatgatgcctccgatggtaagggctactacgcctactgtgccatagatgacgcctacagtggatgtggagaggcctaaaccgccttgttcggctgggtctagtaggaagggtgaggttatttttactaattgagattctgcaaatcggtagaagagtatgaagaaaagcgcaggaataattcctttcttttggaaaaatgaaaggaaggtttcgaaaaattcatggaatatttgacggatattcttcggttgtgcagattcagatattgtatcacatataggatgtggcaacagaaagtggtggtagataaatagtagagtgaaaagcgccgttgtgaggtagaagacgatggaccaggcttgtggaatggcttcctggaccggttgtgttgaactgtaatatttttctaaaaagccggcaagcatgacaattcctccttgaccggcaatgattgccagacggtagaaggtgttgcggattccgacgaaataggcttggtctttttcttggagggcaagcatgtagaaaccatcggcggcaatatcgtgtgtggcagagctgaaggctagaatccaaagaaaagcaagacaataacggatggggtcggggccattaagggtcaaggctatacctcccagaccggctccgatgaggagttgcatggagacaatccaccaacgtttcgtctttagcaggtcgatgaatggactccaaaggggtttgattacccaaggaagatagagaccactggtgtagagcgcaatatctgtattggacatgcccatgcgtttgaacatgatgacagccaccgtcataacaatgacgtaaggtaagccttctgcaaaatatagggtgggtatccaactccaggctttggtgtgttgtttgtccattattcgtagattttggtgattttacttcctttaaaatagtgttgcagtatttcgcgataattatagccttgggcacccatgacagctgctccaatctggcatagcccgactccatgtccccagccggcaccatggagaatgaagttgtctccatctttgtctatgacaaaagcagaactgtaaagatgggtgggagagagtgctttgcggataacgagttctttgccaatggtcagagttcttttgctgccaatgattttcagacggatgagacgtccggagactcctctttcgatgggaatgagctcggtgacaagccctacgtctatgcccagtttttcttgtattaaacgggttgcttctgcttgtgaaatggtttcttgccaacggtagaagtgagaggtttctaaatcatagtcattcaatacttctgatagtatttgtgtatcgtgagtattgcagaatgccggaggtgtggagagtatccaggctcgggctgctttttctgtcgatagatccggaatggtggtttgtgggtttgtatcttgggtggtatcgaggtatgggtgaggtaccggttcccaagtgttttcaaaacgttcggtaatacctccgcagcatttggaaaaacgggcatcgcagatttcatcgttgtaggtgagaacttctccgcgagtggcagccatggcttctcgtacggttggggtatacgctttgctgataccttgataacgttgacaatgatcgtcagcacatacatcgaagtgctggtggtcttctctatcataccatcgtatgtattcatcggttgtctgttggcaggagcaataattgtctttggcttttacagcttttgctttttgcgccaataaccagctgcgggatataacggcatgtgcttttagtagttccaaaccggatgttgctttcatttctgaagagatgacactgagcagatattcttccaatgggaggcagttgatggcagtcaggtggctgttttcgtcaatgatgcgaagagagcctttgaatttttggtcttcttgtcgttcccaatggaattggatgccaatggtgacatctagtagatcgaagttgctgttagtataatcttcgggctgaaattgtagcggaagggttacatactcttcgttattttgttgttttaaaaggtattgtttatcctgacgacagattatgtactcgccttggtagctcttcccattatataaataacggccattgaggcggaaacggatgatgggagcgaatagtatgccgacttctatatgagggatttccatgtttgtattgtttataagcttagtttttgtttaaggtgaaaaatgattgcttccagttcggtggtattgatgcttacctgattgaataggtctgtcaataattccggcgtgtagcgttcataatcttctttgcgtggcgcaatgataagaccagccatgtctacacatccgggactgaacatgatttgtttgttaccttctaaaaagaattgccggggacgccagcatttccttgggaatatagcaacggtccattggaagtcagaataccaggacaaaagattgaatcttggttcttgttcgtacgtaatgacttggccgatggcagtttgaagccggtcgaacagatgctgaagatgttctttgtgtggggattgtaaaataaatacttcccgtatgtagtttttcagccggtagagcgtaatatggttgttttgtgtaattatttcctgtaattgtttgttggttgtgtcttgttctagtggcatgatgtggcgtgggactatttgaaaatgaaaatgatccggtgcggaagcgccacttgccggtccgttataaaatactgtatacgcagggaatgttcgggctatatccaataaatctgtaaaacgcccagcgatcagttgcggggtgtgttcgttggaaggaactgtaaaatgctcatggaaaatgggatacggattgatgtatatattgtatttttctccatatggtagccctttttgttcctcaggcatgtgtgaggggcagaggaaacagttcctttttcgaagcgtggtttggtcgattttggcattggtggaaatgatgcgtgccggattgtattgtacgcgcatttgaatatgcgggaaaggaatgtccctgcagatcacttgttcgagtgcttgaaaattgttacgagctagagggaactcttgtatctgcctgttgtatagtgctgttaaatctttatttcccatattgtttcatttctttcattcgagcggataattcaatgcttcgtaatgtgtctttataggtgttgtaggtgtttagtttattgatttccaaggaagcatcagtgttgccatcccaacggcggcacaagtaaagcggttggtaaatacgtccgatacggtagtggcgtgatatggcaagccctacagcataatcttctccgtagctgacattcgggaatttgattgttcgtatcagtggggtgtaaaaagcccggggagctcccagtccgttgatgcggagcgcattgttgcgtccattatctggagtccattcgcgatggtctatgaggcctggaggtatttcctccaaagcaaaattgaccatttggtaactgccgatgagcatggcgcattgctgttggtagaagttgtcaataatggtttgtaaggtatgtggggtgttgtataggtcgtcactgtccaattggacggcaaaacgaccgcagtgaggggattgtatggcttcgttccagcaaccgcctataccgagaagtgtggatgtggggtacaaatgtaccacttggggatgttcttttaccaggttgtgtataatttcagttgttccatcattggaatgattgtcaacaacgatgatattataggggaaatcagtctgttgttgtagagctgaacggattgcatctgcaattgtcttggcacgattacggaccggaatgataatcgaggcttcaacaggaaaagtgcctttgtttaaatcaatatcttggaaaacagggggtagccatcctcctatggcttttaaatgttctgtgcaggctgcttccatttcgagttgtacttcccgatttttcggattgacatagtcaaattgtttttctcccgatttacgggaatcggcatcttctattgtgtataaatattcgggaagatggatgatttcgccttggcgggaaaggtgtagacgaagagcatagagtgctgcatattggtagtctgtactcagattgtcgatggcttgtaaaaatgcagaggtgcgaatgagccatagcggtccgaagtcgaagtcatcgcgtaagcttcctttttgataatttatagtggggtgtgtgaaccttttgtcatcttgttgtgtataataatcgctgtatagcatgactgcctgactgtcacaggcaacttgttgcatccgttcgagtgtatttggcgaaagttggagttgtgtagtcccggaatatagaaagaaaaattcggaatgaatctgttttttaagttcatacagttctgaagtcctgcagtaggggcggatatgaaatattgtttttaaatccatagtgattgttttttgttcaaaactataaaaaatacgggttcaaaactaatattagtcagacaatagttggaacaggcatttgctgactgtgtcatagtcaaagcctctgcctactgcgaagcgggtgagtttggcctttagtttgtatggatcttgttctgtaagtgtgcggtatttttgttgtagaagttccatacaatgctctgtataattgtctgtcgggatgatagacaaagcttcgtcaatgatgtcttgtgaaattcctttttggcgcagcatcatggtgattttctgtttaccccaatggttgaagcggaatttgtcttcggtataaatgcgggcaaatcgttcgtcatcaatgaatttgtgctccaataggaatgacatgatctttttaatgtcctcttcttgtatttcccatttgattaatttttgtcgggcatccttactgcaaatttcttttttactacattgtccggcaagaatatttagtgcttgttccggtttcattatttggaggctttaatcattctttctttttcgaaaaagtcttttctcagctcaatatttttataacctttttgagccagtaggtcgacggtttctttaccgaaagcttcattgatttcaaagaaaagaagacctccgggtttcaagtgatgctgtccgaattctgcaatggtgcgataaaatagcagaggatctgtatcattgacaaataaggcccttgccggctcatactcaagaacgtttttatgcatttctttcttttcacattccctgatatagggagggttactgacaatgatgtcaaaagaattccacttatagttgtcgtaatgtagaatgtctcttgccataaaggttacgtcagtctgattgataagggcattttcttgagctgtttccagggtatcttgggcgatgtcgatggcacagacaacagcctgggggcaaagatgtgctatgctgactgctatacatccgctaccggtgccgatatctaagacatgcatgcctgaacaggtgtttcctgtaacccatcttaccagttcttcggtttccggacgaggaatcagtgtactgcgattgactttgaactgcagaccggcaaatgtggtttctcccaagatatattggagaggttcattttgttgtaaccgttgtataatggaatgaaatttatttacaaagctttcgtctaaagtttcgttttttttgatatggatatctatatttgtaaaatgtaaaacatccatgtatataatacggcagatgctttggatttcatgctccgggtatgaatcttttagaacttgccgggcgtattgtgataaatgaaaaatagtattcataacacaaagataggatttaaaaactgatttcatgtcatgatgtggttacaaatcatcatatatgtttgcgttgcactttattttttgacgctgataagtgtgattttcaatgtaattcttgaaaatcgcaatcctgtgcgtactttggcatggattgttgttatggtggcaattcctttggccggttttttgttttatttctattttggggtgaattacagaaaaatcaaaatgttttcgcgcaaaggtttgggggatatgaagtggttgcaatatatgagcgaagaccagaagcagttgattaagaagtctgaatttctgcagcggcgagataccgtagctgtacgtaagttgatgactctgttgttgaataatagtaaagctttacttacccggtataatcaggtggaggtgttggacaatggtgtagagacttttccggctttattcaaggcattgggacaggctaaaaaatttatccatttggagtattatattatggatgaaggacgcttattgacggaactgaaaaatattttgcttgccaaggctgccgagggtgtggaaattcgtattatttatgatgatgtcggttcgtggagtttgtcgaaggggtttgttcgtgaactgcggactgccggtattcagatttatccttttttgcctgtacgtttccggcaatttgccaggaaagcgaattatcgtaatcatcgtaaaattgctgttattgacggggttgttggctttgttggtgggttgaatattgctgacagatatgtagatggagtgccgggaatcggtgtttggcgtgatacccatttgaaagtgataggagaagcagtcacttctttgcaggtgatatttctgattgattggtatttcgtacgacaggagttgttgttgaataaggatgagtatctgccttatgtgcaggccgacagtaatgttgtggtgcagacggtgacttcggggccggatagtgattgggcttcgattcaacagtcgtattttacattgattaatatggccaaacggtatgtttttatttcaacaccttatttcatgccgggtgagacaactttaaattctttgaagacagctgcaatgagtggtgtagatgtcagaattttattgcctcataagtcagattcaaaacttacgtattggtgtacgcgttcgtatattgaggagctgttggaggctggggtgaaaatatattggtacaaaaagggcattaatcattgtaaggtgattattaccgatggtattgtggcaagtgttgggtctgctaatatggatattcgtagttttgagcagaattttgaagtgaatatgataatatatgatcgggaagttgttaaaaaattagcgactgattttgctaatgatttaaaagatagtgtagaaagtacgattcagcattggaaatttcggcataagcgagagcgtgtctatgaatcgatggcacgtttgtttgctccattattgtaaaagtataaattgttgtatataaaatgtttagcaaggaaattgcagtagtattgaatggagaagcctgtggtgttaaagactttgaaattacagaaatcagtgtggatagccgttctttggtaaatccggaaacggctttattttttgcgttgaagggaataaatcatgacggacatgattatgttacagctttgtatggacgcggggtgagaaattttgttgtcggtgagtatcgttcggagttcgagaagttggctgaggctaatttttttgaagttccggatgtgaaaaaggctttgcagacattggcatgttggtatcgccaacagctggatgccgatattgtaggggtggcaggcagcaatggaaagactattgtgaaggaatggatttaccagatgctttcagaagagccggatatttataggagtcctcgtagttataattctcaaataggagtccccctatctttattaggaataccaaaaactacccgtttggctgttattgaggcgggaatttctcagccgggcgagatggtgaaattgcagcagatgattcagccccgtgttggtatatttacgcatttgggagatgctcatggtgagaattttaaatcgcgggaagctaagttggaagaaaaagcccggctatttgctgattgtgaggttgttattgggcagactggtgcttctttggattatattatgagcgtagctggttttgctgctaagcggatagcctggggtgaaactgaggatgtcgaggtgcgtatatgtgagaatgtgcctgatgcttgtgggcggcgcgtaactttgaaatggaaggaggattattgtacgtttcacatcccatttgctgacgaagcttcgtatgaaaattgtatgaatgcggtttgtctgcttttatggaaaggtaaggaattggggtatattgtttctcgtgtggaacaattgcagccgattgctatgcgaatggagataaaggatggtattaatcattgtgtattgattaatgactattataattcagatgcagcatcctttcaattagccctgaagaccctgacgatgcaggatgccggacgtgggaaggttgtgatactttctgattttgtagatgtgggggctgatgaatgcggactttatcgggaggtggctggattgttgaaaaaagctgatgtgacggtatttatagggattggtgagaacgtcagacgttataaagattatttccaattgccagaatgtcgtttttatcaggatacggatagcttcctgcatcaggaaaaaagagaatcgttcaagaatcaggttattctgataaaaggggctcgtaagtttcgttttgaatatattgccggtttccttcagaagcaatcgcattctaccgttttggaggttgatatggatgcaatggtctataatttgaatcattttcgttctcttttgcctcagcagacaatgatagctgttatggtaaaagcgttttcttatggtagtggttcggtggaggttgctaacttgttgcagtatcaaggggtcaattatttaatggttgcttttgctgatgaaggagtagagttgcgtgctgcaggcattacgattcctatcggagtgatgaatccagagccggaagcttttgataatatgatagaatttggtcttgagccggaaatatattcgttggatttgctaaaggcttttgataatgcattaattaaacatggtatagaaaaatatccggtgcatctgaaattaaataccgggatgaatcggtcgggtttggatgtaggagaccttacggcgttattggaattttttcaggcgaaacggcatgtgataatacgttcgatgttttcacatctggctggtagtgatgaggaaaagcatgatgattacactcagtggcaaattgataattttgtgagcatgacagaagaagtgcaatctcattttgattatcatattttgcggcatatactgaattcggccggtattgaacgttttagccgttatgcatttgatatggtgagattggggattggtttgcatgggattagtgcagatggtgcttcgttacgtccggtcagttcatttaagacttatattgcctctgtgagggaggttaaagccgagcaaacggtaggctatggtcgtaaaggtgtattaaagcgcgattctcgtattgctgtaattccagtcgggtatgcagatggtttgaaccgacatttaagttgtggagtaggggaagtgatggtgtgtggcaagcgagccccgattgttgggaatatttgtatggatgcctgtatgattgatgttacggatacatcggcgcaagtgggggatgaagtggaaattttcggaaaacatattcccgtgacagagttatccgataagttgcaaaccataccttatgaagttttgactgccgtctcacatcgggtgaaacgggtctattttaaggaatagtaaaaaagcgctatgtacagtagcgctttttatttttattgtactttgttttgaggagttccttgtagccacatttcaatattgcgaataacaatgcccaaccgaatggcaaatgcttcatgagtagcgtatcctaagtgtggaagcattaataaattaggagcattgaaaagttctaaatcggcagggagtggcggttcttgatcatatacgtcaagggcagcacctgcaatttgttcctttttcaacgcttcgtatagtgcgtgttgattgacaataggacctcgtgctgtgttgattaatatggcgtgtggttgcattaatgcaaattcatttgtatcaatgaagtttcgagtttcttcattggaaggtatatgtacggaaatgatatccgattgttttaaaagagtttgtttgtctacttgcgtgacattttcaatttgtttttcgtgtctattataggccaatactttacatccgaaggcattggctaattgtgctactcgttgtcctatggcacctagtcctataatgccgattgtttttccgcataattcgcaacccaaaaatccttttcggtcacttgaaatacgtgtaatggcatctcctccgacgattttgcgatatagagagataatcataccgattgttaattctgcgacagcctgtgttgagtagccggctgcattgcagactaaaatcccgcgtttttggcattctttcaagtcaatgtgatcaacgccggtgaaggccactgatagcattttcaactttgggcaatgttcaaaaaaatgttttcttaatgggatattgctaatgacaacaatatctgcatcttttgcccgttcaattaatatatcttcattttcttgacggtcaggataaaaaattacctcgtgtccctgtttttttaagtttgcaactgctgcgttgaatttgcactcacatattcctaatggttccacaaatacaatattcatatttcagtaaagctattaatttttgaagaatgataatattgtcataagatgaccgccctaagttagagaatgttttctttatatgaaaaataacttttctctttttttttactaattttgttgccccataaaaatgggaggctaggtcgtatttctaatttaaactatcatgacattatccgagaggcaccataagatattggagttgctgaaaattaatgggacggttgctgtgaatgagttgtcgaaacttctggatgtttcatctgtgacaattcgtaaggatttgggaattttggaagagaagaaattgctttaccgttcgcatggaggtgctattcaaattgatccatatattggaaatcggcacgtcttggagaaagcaaagcattttccagaagagaaaaaacgtataggtttgaaagctgcagaattactacaacctaatgatgctattattatagcctcaggaacaacggtattggcttttgctcagtgtatagctcctgatgcacgtctgactgtgattacgtctgcgatgaatgtttctatggagttgattaatcatcaccaggtggaagttattcagttggggggagttgttcggcatacatctagttcggttgttggggattatgcagaaaagatgttggctaatttttcctgtagcaagctttttctcggagtggatggaattgatttggcgtatggattgacaacaactaattcaatggaggcaagtattaatagagttatgatagaagctgctcagaaaacaatagttttgactgattcttctaaatttgggcgtcggggctttggtaaaatatgtaacttagatgttgttgatcaaattattacagatgcaggagtgtctcctaaagtggtgaagggcttggaggatatgggtataaaggtttctattgtgtgaaaaaaaacgaatattttttcactaaaatatttgtggaaagaaaaaaatactctatctttgcactcgcaaaaaacaaaagagttcatctttataatttaaaaatgcgaaaatagctcagttggtagagcacgaccttgccaaggtcggggtcgcgggttcgagtcccgtttttcgctctttctctacgaaggatgctcgaatggtggaatcggtagacacgcgggacttaaaatcccgtggccattgcggctgtgcgggttcaagtcccgcttcgagtacatgaaaagacgctaattgcttgtttgtgagtggttggcgtcttttgcttttaatctatgtgtcacaaaaatgtcatctcattttttttttatatatatttatttcttatttttagagatccgaaatgttgtagaaacttttatttcagtattcagattgtgtgatgttgttgtggtgaagtcggttgcaatttatatatttgtggtcttaaaagtatttggatgatggctaataaaaagaagaaagttgcgggttcttattttgtttcaacgctgagtattgctttggtgttggttgttgtgggtgctcttgtgtttatattgttgaatgcaaggcagatttcagatcatgtgaagcagaatattggtttttcaattattgtgaaagacaatataaatgaggcggaaattaaaagagttcagaaaattattgatacgaagtcttttgtggcatcatctatatttatcagtaaagatcaagctgcccgtgaatttaaaaaagagctgggtgaggattttgaggcagtattaggttataatcctcttttgccatcaatagaaattaaattgaatccagtatatgcaaataatgattcattggctgtgattgaaaaaagtttgttgaaaaatgagataattcaagaggtttcctaccagaaatctttggtgcagatggtaaatgaaaatgtgcgccgtatcagttttattttgttaatagcaggagctatcttgttattgatttcttttacattgatacgtaatacaattcatttggctgtttattctcaacgttttttaattaaaacgatgcaattagtcggagctaaaccagtttttatttgtaaaccgtttattcaaaatggtctttggtttggtttctttggtagcatgtttgctaatattttgttattgactgctatctattttttacagagagagactattggtgtggttgatttaatgaacgaaaagttattgattgtgatggtggtatttgtgacgttttgtggaatgttgttatcttttgtttcatcgtggatgtccgtaactcgttatctgagtaaggatttgaatgatttgtatgattaaagaatattaaatacgattatatatgatgttgaagaataatttaaaggatgatgtgaataagaaggcaggatttccgattcctgtgagtagttataaaatgattctaataggttttggtattgttgtacttggatttgttttgatgatgggtggaggaagcagcgatccaaatacgtttaattatgagatttttagctttaggcggataactttggcgccaatagttgtgttaggaggatttggttttatattttgggcaataatgcgtaagccgaaaaaagaaattgaagatagtaaagataaataatagatgtgtgaaatttaaattttaattgctagtatgtcttggttggaagctttagtccttggtgttgtgcaagggcttacagaatttttgccagtaagtagttctgggcatttgcagatttttagtgctttatttggagttcagggtgaggagaatttaacttttgcagtaatagtgcatgctgcaacggtttgtagtacgattgttgtgttgcgtcatgaaattgcaaagttattgaagggtttgttctgttttcagtggaatgcagaaacaatttatattgccaaaattgctttgtctatgattcctgtagctgttgtagggttgtgcttcaaggattatgttgaggaaatttttggttctggattgttggttgtaggggtttctttgttgataacagctggtttgttgtcttttgcttattatgctcgtcctcgcgagaaaaaagaaatttctttccgtgatgcgtttattataggaattgcgcaagcatgtgcggtattgccaggtttatctcgttctgggtctacaattggtacgggcattttattgggaaataataaggaaaatgtggcaaagttttcttttttaatggtattggtaccaattttgggcgaggcctttttggatttgatgaagggtggattttctccggcggaaagtggcatatctatttctgcgatgttggctggttttgtttcagcttttctctcaggatatgttgcttgtagctggatgttgaatttggtgaaaaagggtaaattgatatggtttgcaatatattgcttgattgtgggagtttcgatattgatttatagttttatataaaagtattgtgtgtaagattatttttcaggaagagaaagattttcatgcaggggcattgattttagttgataagccattgcattggacttcatttgatgttgttaataaaattcgttggtgtttgaaagcgtcttgtgggaagataaaggtggggcatgctggaacgttggatcctttggctactgggttggtggttgtgtgtacgggtaagtggacaaagcggatagaggaatttatggcgcaggataaggagtatgttgcagatattcattttggagaggtgacaccttcttttgatttggaaaccatgccagaaggttgttatcccgtagagcatattacagaagtttttttggagcaggtcttagatggatttcgtggcgttattcagcaagtgcctccggtttattcagctattcgtgttgatggtgaccgggcatacaaaaaagctcgtaagggaggggaacttgaaatgcctacacgtgaagttgtagtggatgaattggatgttttaaagtttgcgatgcctgatattcagttgcgtatagcatgtagtaagggtacttatattcgttcgttagctaatgatattggacgggcgtgtggtagtggggcatatctatccggtttgagaagattgaggagtgggtgttttaatgttgcagatgcaaataaaatggatgaacttattgtatttttgcaaaataaactgtaacttgcagcgttttaatgaaattgggatacttctgttttgtttggaggtgttcctattttcctttttctataggttaaattgttaattggacattagtcggtaatttttaaatagaagtagaaatgaagttatcaaaattcagatacaaactccccgttgatttgattgcgcagtatccgtcagtaaatcgagatgagtgtcgtctattggtgttaaataaagaaacaggcgagattgagcataaaatatttaaagatgtcattgactattttgatgaaaaagatgtttttgtgttcaatgataccaaggtgtttccggctcgtttatatggtaataaggaaaagacaggcgctgaaattgaagtgtttttacttcgggagttaaaccgtgatatgcgtatttgggatgtattggttgatccggctcgcaaaattcgcattggaaataaattgtattttggagaagatgatagtttagtggctgaggtgattgataatacaacttcgcgtggtcgcactttgcgttttctgtatgatggagactatgatgaatttaagaaattgttatatagtttaggagagactccactacctcgtagtataacgcgtaaggttgaaccagaagatgaggaacgttatcagactatttttgctcgttatgaaggtgctgttgcggctccgactgcaggtttgcattttagtcgagaattaatgaaacgtatggagataaaaggtatcgattttgcttatattacgttgcatgtgggtttgggtaatttcagagaagttgatgttgaagatttgacaaagcacaagatggattctgagcagatatttgttactccagaaacagtaaaaattgtaaatgatgcaaaggatgagcgccacaagatttgtgctgttggaacaactgttatgcgtactttggaaagttgtgtgacaaccaagggacgtttggcggaatatgaaggttggacaaataaatttattttccctccttatgattttagtgtgccggatgcatttatttctaactttcatttgccgtattctactttattgatgatggttgctgcttttggagggtatgaacatgtgatgaatgcttatgatgttgctgtaaaagaaaaatatcactttggtccttatggagatgcaatgttgataatatagaatattttaatgtattagattagcggggggggggctgttaaggttccgctttttttacacatgctcttctgtgagtggtcaaaatgtattttttgacataaaaataagcctttgtcaaaaacaaaggcttattttataaattagaatattatcttacaatttgcttgcgtcaaccaacaattctttgttgtactcgccatttgctaatttttcagcaacatttttaaatgctttgatagtatactcaacgtcttccatcgtatgttctgctgttggaattaagcggagtaataactgacctttaggaataacaggatatacaacgatagagcagaataaattatagttttctcgcaaatcaaatacaacctgcatgccctcagctacgctaccagataggtatactggagtaaccatagagttggtaattccaatattcatgccatcagcttttaatccactttgcagtgcatgtgcgattttccaaagtttttcacgtctttctggctgtgtttttaacatttccagacgtttaatagcaccttcaaccattggcatagtcaatgatttggcgaacatctgagaacgcattgtgtagcgtaatgacatgcaaacttcttcgtcagttgctacgaaagcaccgaatcctgccatggcttttgcaaatgtaccaaaataaaggtctattttatcttgaacaccaaaatgttctccagtacctgcgcctgtcggacccattgttccaaaaccgtgtgcatcgtcaaccaataaacggaagttgaattcagatttcatggctgtaatctcatctaatttaccaaggtctccggccataccgaatactccttctgtgataacaagaataccgcctcctgttccttcaacatattttgtggcatgttctaattgcttgcgaaggctagccatgtcattatgtacatatacatagcgttttgcaggggataaacgtaaaccgtccatgatacaagcatgtgactctgcatcatacacgatacaatcgaaacgcgaggttaatgagtctatgattgaaatcattccttgataaccgaagttgacgagaaaagcatctggcttaccgacaaattctgcaagttgagactctagatattcatggcgagaagtctgaccactcatcatgcgagctcccattggatatgccaagccccatttagcagctgcttctgcatctgctttacgtacttcaggatcattggcaaggcctatgtagttatttaaactccagtttaaaacttctttcccgcgaaacatcatacggggtccgatttctccttccaatttcgggaatgcgaaataaccgtgtgcttctttagcatactgaccgatatttcctctttgtttttttactctttcaaaaatgtccacgtctatagtattttgaaaatttatgtattctgattttagtcgtgcaaaaataataattgattaactaaaaagctaaaggttagggtgaaaagtttgaagattgggtataagtacgcatcgaaatggagaaagtgaagtgcatgatgaaaaagtttttatcttttactttttagttattactttttcctctatctttgcatgatgcaaaagaagtgataattgatgagcatatgaaaagaatattagtttttttattggtagccgtattattggcttcgtgtggagaatatcagaaactgctgaagagtaatgactaccagttgatttataaaaaagctattgaatactataataaaggggattatcagcgttccttgagtttgctggatggtattcgtactgtatttagtggaacaagtaaagcacagaatatagcttattatcgtgctttttgtagctataatatgaaggattatgaaatagctgctaattcatttaagcaatttattcaaacttatcctgagagtcctttctctgaagagtgtctttatatggtcggattttgtcactataaagcatctcccaaaccgaggcttgatcaaacagttacggataaggctttaaacgaattccaattataccttaatagatatcctaatagtatgcgcaaagagaaaatcaatggttatatggatgagatgcgcgacaaactttcttataaggcatatttaagtgcgaaaaattattatctgcgtgaatactataaagctgcaacgattagtctacaaaattgcttgaaagattatccgacttcaaaatatcgggaagaaattatgtatatgttgtttgtctctaagtatgaaatggcggttaatagtgtcgaagataaaaaattggaacgttataataatgctcaagaggagtactattattttgttgatgaatatcctaatagtaagtatgctgatgatctaaagaagaaatatgaggagattcataaatacttggagaattataattttgaagaataagaacagattattaattatacatcagttatggtagatttcaaaaaagtaaaagcgccgaataacaccattactcgcaatccagctaaattggctgctaaagcggataataatatttatgaggcggttgccatcattgcaaaaaggtcaaatcagattgccgttgaaatgaaagaagaacttagtcgtaaactgcaagagtttgcgtcttgtactgacaatctggaagaaatttttgagaatcgcgagcagatcgagatttctaaattttatgaacgaatcccgaaacctgtattaatcgctacacaggaatttgaggatggacagatttattttagaaatacaactgctgaaaagaaatctgtttaagcgtttttcgtacgtatacatttaatgtaccaatgccaattgtaaatctttgattgttgcattggtacattttaatttgatgaatttaatatgttgaaaggaaaacatatcattgtcggtataacgggcagtatagctgcctataaggctgcatcgctcgtgcgtttactagtaaaggaaggtgcagaagtaaaggtagtgatgaccgatttggctaagcagtttataactcctttgactatggcaacattgtcaaagcatcctgtgatggtggagttttataacccggaaaatggcgattggcattctcatgttgatatgggcatgtgggctgatatgtatttaatagctccggctacagctaatacgattggcaaaatggcacacggaattgctgataatttattgcttacaacgtatctctctgcaaaatgtccggtggcaatcgcacctgcaatggatttggatatgtataggcatcaggctacgcagcgtaatttggatattttaaggagctacggaaacttgattgtagagcctgctgaaggggaattggcgagtggattaattggtaagggacgtatggcagagccggaagaaattgtaactttcgtgcgtgattttttttgtaaaggtaaggagttggttgggaaacgtgtattattgactgctggaccaacatatgagcggattgatccggttcgctttattggaaattattcttctggaaaaatgggatttgctattgctgaggcttttgcttctagaggggctgaggtggtattgattgcaggaccggtacaattgaatataagtcatccgttgattcgtcgtgttgatgtagaatctgggcaagaaatgtataatgctgtgatgagtgaagtagagcatagtgatatagttgtgtcttgtgctgccgttgctgattttcgccccttgcattgcgcagatagcaaagttaaaagaggaaaggataacatgctattggaattagaaccaacaacagatattgctgcggctttagggcagaagaagagagagggacaattgttggttggctttgcattggaaacaaatgatgaagagtgcaatgcaattcataaattgcataaaaagaatctggatttaatcgtacttaatagcttgaaagatgcgaatgcttgttttggttatgatacgaacaaggttacaatgatagaccgtcaagaaaatcaatatcattatgaattgaaaaccaaacgagacgttgcagaagatattgttgataggattgcggcaatgttatagaacgaaatttttcttcgaaaatatttgttcgtctaaaaatacttccgtatctttgtatttcgatatgaatataggatatttaaatattggtacgcttgagcatgtatttgcggataatcgcagacaggtttgccagtttatttataaaaatttaagaccaacattgtcgtaagacttgttggtttttttttgtctaaaacgaacttaattatattggtatgaagacacacagcttagtatctatcgaagattacagtaaagaagagattctggaagttttgaaccttgcttctgaatttgaagcgaatccaaatcagcgtttgctggaaggaaaagtagttgcctcgttgttttttgagccttctacgcgcacccgtttgagttttgaaactgccattaatcgcctgggaggacgtattgtgggtttctcagatgcatcttcatccagcgtgacaaaaggcgagactctgaaagacaccattaaaatggtggataactattgtgatttgattgtgatgcgccacccggtggaaggtgcggctcgttatgcaagtgaagttgctgtacatcccgtgctgaatgctggtgatggagctaaccagcatccgtctcagacaatgctcgacctttattctatctttaagactcaaggaactttggagaatttgacaatttgcatggtgggtgacttaaaatacggacgtacagttcactcgcttttgcaggctatgagtaattttcatccgaccttccactttgtttctcctacttcgctaaagatgccggatgcttataaattgcgcttaaaagaattgaatattccttattatgagcatactgaacttgacgaagtaatagataaggcagatattctttatatgacacgtgtacagcgtgagcgtttcgctgatccgttggaatatgagaaagtgaaaaatgtatatattttgcgtaatgccatgctggcaaatgcaaaagataatatgcgaatcctgcatccgctgcctcgtgtaaatgaaattgatgtagatgttgatgagaatccaaaagcttattattttgaacaagctcgtaatggtgtatttgctcgtcaggctattatctgtaaagctttgggattgaaataattttaatggttcaagattaattgatttattatggctaagaaagaattacaagtaagtgcaatcgaaaatggtacagtaatcgatcatattcctgctgataaactgttctctgttatcaatgtattgggaattgcggacatggaaaatgcaatgacttttggaaccaacttgaaaagcagtaaattggggaaaaaagcaattatcaaaatttgggataaatttcttgaagactctgaagttaataaattggcattggtagctccgatggcaaaaattaatatcattcgtgattatgaagtggtggaaaagaaagtggtaagcgtgcctgaaaaggttgagggtattgtaaaatgtatgaacccgaaatgtatcactaaccacgaaaaagtattgaccaagtttactgtggttaacgactctccgattgtattgcgttgtcactattgtgaaaaactgacagaccaggaacatatggagatggtttaatcttaaaaaattaaaatatcatgagtggcaaaagtctggtaattctgaaattaccacttttgccactctttttatggaatatatatttctaggatttctgattctttttgcgggataagaaagatgttttttaaacaggctggaactaatatagtttcaccttgagtgacgttcactgtttggtcaacgttgtaaactacattgaaatttccactaaggcacatgtagatgacaaatgaatcttgttctatataatctttttcaacttccttgttgaaatttagataattgacagtgaaccaaggacattctattagttcttctgtgtggtttttatgttgatggtaattgatacgtgattctatagtgttgtagtttataacatcagtagctagttctatatcgaggttgagcttgtctccttcgattatattgcggttatagtcatcgagataatatgtaatatctgaagtctgttgtatttcggctacaagacatcttccggagagtgaatgtaccgtctttgatggtaaaaagaaacaatcacctttgcatatgggctctatatgtagtatttcagcttgtgtatgttgggtgaggtgctgtaaaaattcacttcgattgctggattttttaaacccggctgtgattttagagccggactctgcttctgcaatataccataatttgtttttcccatatgcacgatggcgttctttggctgtttcatcgtcaggatgtacttgcaaagggagattgttgttcatgtcaagaaacttgaccaaaagaggaaattcgatgccgaatttatcaaatactttgtcacctactaggtctcccatgtatatttcagttaattcttctaagctgttttcagctagtatcccttctgtaacaatggatatgttttcttgtacacccgaaatttcccagctttcgccaataggctcatgttgttgtattgctttgtctttataggcaagacgtttcccgccccagtgggccttttttagtatcggtttgaatttaagaggatataacatagactttggtataaaaattgtatgacacaaagatataaggatttggcatatgccggtgtgtagactagtataattaatcatattaaataattaatcaacgataattattggagtaatgagcatgaaaaattggatgtttggcattggtttgctttgcttgttggcgagttgtaatgatgacaatgacagggatgagactattttggacatgtcttatttgacgggtaaaaattggtattataatgcttggctgggagatcctaatggtctgaaatcacaggatttgttggaagttgtgcgttttgaaaaaggaggtacgttaaagaatattgaatttggtggacgccgtgaatttgaagtcggaacttggacaagcgatggtaatagaatagaactcaattatcataatggcgagccggttgtatggaatgtgcagcgtagtggggatgattatattgaaactattgtgaatgccacaggcaagcgggaatatacttctgaattaaagtatttggacgatttgacggttgatgccttcttggtgaacagttattccattgacgggcagtttaagatacatattggtgctgatgtacgtggtaataaggatttgcgtgaagtacggatgttattgaatgatgggcatgtctgtgatttggaaaatcacgaatattattggactgaaaagcaaagcgatcactatggcaatactcaaaagcaagaggtacgattttactgccgtatcggtaaggataggcatttgaagctgtgcgattccatctacggagataatctacctaagcgtacaaacgatggaatgaatatcacaactaagatgcagtcaagcacattgtctgttttttgggatgcatttgaacgtgatgatatttattatcgggtagaaattctgcctgtcagtggtaaaactgatagtccttattttgtgagtcgtattcagagacccggttctcagcgtttggatataaagaatacgacagcaggagaagtaaatcgcttgaatgaattgcaatcaaaggaaagttacatgatacgtctttctgctttattgtacgagccgggtattgacccttggaatgataattatggatatgcaaatatacaggcagtttcctattttagtacgaattttgtctgggaatagagtttaagtgttttaaatggctgttgggtttattcctggcagccatttttgtttgttgactcgaaaaattgttttaatgcttcagctagcatttggggttgttgtgcatgaatccagtgtccggctccgttgattgtaataaattcagattggggaaagaggcttttgatggtgaatacatcatttgtttgtatatattcagataattcgcctcggataaatagagtgggctctttacattgttttgtacaattctcccaagtcatgagtgcttgtatagattccaaaatggttgttacgtttattctccatctgaaaccattctcccttttatctatgtttttcagcagaatctgacaaatacgttcgtcttttaactctttgcggatacgttggtgcaactgtgcgcgattctctccctcaataaacgaaaattgttttagaaattgtataatctgacggtgttcttctgtttgttcgtattttttgggtgcaatatcaattatagcagcctttgttgcaatgggaggatattttagcagtatatgcataaggcattttcctcccatcgaatgtcccgcaatgaaaaggggtgtttttaaatgaagagattcaatccattcataaatatcttcagctaatgctgggtaggtgtggacgtccgcatggggtgagtgtccgtgattccggaaatcaggtagcagtacatggaaattcgttgaaagtatttcagctacttgcagccaattatctgatgcgccccataatccatgaagtattattaggggtgggagtgaagctttgcctttttctctgtggaataatttcataggggataaataaaggtggcaacattgttgccacctattcttatcaagtctcagaattgcatccaatgacgcattacgtacgatttgaatgcatcctttgagtcttagtctttcaattttgctttcaggaactcgcggttcaagcgtgcaatgtgttcgatagaaatactcttcgggcattccatttcgcaggctccggtattggtacagtttccgaatccaagttcatccatttttgcaaccattgcttttgcgcggcgggcagcttcaactttaccttgtggtaatagtgccaactgtgatactttagcagcaacaaacaacatggctgatgagttcttacaagttgcagcacaagctccgcaaccgatacaagcagctgcgtccattgcctcttctgcctgagcattcgggattggaattgcatttccgtcaggaacaccaccggtatttactgatacgtaaccacctgcctgaagaattttatcatatgctttgcggtctacaatcaagtctttgattacaggaaacgctccgcatctccacggttcgatggtgatggttgctccatcctggaagcggcgcatgtgcaactgacaagttgttacatcatcgtctggtccgtgtgcacgtccgtcaacaaacaagctgcaagtaccgcagattccttcacggcaatcatggtcgaatgcaaccggttcttcgttcttttcaacaagttcttcgttcagaatatcgagcatttccaaaaatgaagtgccggtagagatattgtgaaccttatatgttttaaactcgccttttgattttgcgtctttctgacgccaaatcttcagagttagttcttttaatattttgtctgccataatgtttttaatttggagatttgaagttctttatgtctcaaatccggtttattatttataagaacgctgtgttaactgaacattttcaaatacaagctcttccttgtgtaattcaggagcttggttttcacctttgtattcccaaaccgatacatatttgaagtgttcgtcatcacgctgggcttcaccttcgctggtcattgattctacacgcaagtgacctccgcaagattcgttacggtcgcgagcatcatgagccatcaggtcagccaattcaatgaaatctgctacgcgggcagccttttcaagctcgttgttcatggctgtaaactcgccggttacacgcaaatctttgtagaattcggtcttcaattttgcaatcagctcaattgctttgtccaatccggctttctcacgggccataccgatatattcccacatgatgtgtcccaattctttgtggaagtggtcaggagattttgttcccttgatatcgtataatttacgcagacggtcggtaacatgtttttccgcttcttcgaattctttggtattggtgttgattttcggagtttggatatcttttgcaagatagtctccgattgtgtaaggcaggataaaatatccgtctgccaatccctgcatcaatgcagatgctcccaaacgatttgctccgtgatcagagaagttacattcaccgatagcatacagacccggaatagtagtcatcaagttatagtctacccacagacctcccatagagtagtgtatggccggataaatcatcatcgggttgttgtacggatcaacagctgtgattttctcatacatctggaacaagttgccataacgtttcttgatagtctctctacctaactgttggatggcatatttgaaatcaaggaatacggctttaccggtattatttacaccgaaacctgcatcacatctctcttttgcagcgcgagaagcaacgtcacgcggaacaaggtttccgaatgccgggtagcggcgttccaaatagaagtcgcggtcttcgtccggtatatcgttcggattcttggttccggcctgtaatgctttggcatcttctattttctttggcacccatacacgaccatcgttacgcaatgactctgacatcaaagtcaacttactctgctggtctccgtgtaccggaatacaagtcgggtgaatctgtacaaaacaggggtttccgaacattgcaccacgtttgtaagcctgccatgctgcactaccgttacatcccattgcattggttgacaagaagaatacgttgccataacctccggttgccaatacgacagcgtgagctccgaaacgttcaattttaccggttaccaggtcgcgtgcgataacaccgcgtgctttaccgtcaacaacaacgatatccaacacttcgtggcggttgtacatttttactttgtcggcttgaatctgacggttcatagctccgtatgcacccaacaacaactgctgtccggtctgaccgcgggcatagaacgtacggctaaccaatgctcctccgaacgaacggttagctaacagaccgccatattcgcgtgcgaaaggtacaccctgtgccacacactggtcaatgattgcattacttacctctgccaggcggtatacattggcttcgcgtgcacgatagtcaccgcctttgatagtttcataaaacaagcggaatacagagtcgttatcgttaggatagttcttggctgcattgatacctccttgtgctgcgattgagtgtgcacgacgaggagagtcctgatagcagaaagcagttacattatatccaagctctgcaaggctggctgctgctgagccaccggcaagacctgtacctactataataacatctaattttttcttgtttgccgggctgacaacaccgatgtgggctttatgggcagaccatttgtcttttaacggtccggcaggtattttagcatctaatactgacataataaattgattttgaatttttaaattgagattcacattactttccgaataccatgaaataaatcggaatgatgctgaaacctacagcaaatacaatagcgaagaaataagctacgtactccagacgttttctccaaatctggttagaaaaaccgatagactggaatgctgaccagaaaccgtgtgaaaggtgcaagcctaagagaatggctgcgatgatataaatgatggcatataccggctgcatcaaggttgtacttaccagttcatagtggtcggtaatgtcgccgaatttaaagctgaaccagaagttgcagatgtgcagtgccaagaatgccaacaccaatgcacccaaaatatacatgttgcgtgatggccaagtacagttttgcgattggctacgcattgcatactttgtcggacgtgctttttggttctgaatggtcagaatgctggcccatacaatgtgaacgatgaagcccaatgccaaaatcggttcgataaccttgattaccggcagcgacatgaattcacatcctgcattgaaggcatccgggcctacaagcaatagcaagttcacactcaagtgaacgcacagaaacataatcagaaaaagtccagataaactcattatgacctttttcccgattgaagaagtcaaaaaattactcatgatttgttttactatttattaatactggtttatttgcttataaactttacaaaagtactcttttcccttgaataaaactccaatttcgtatgtagaatggttctaaattcagaattttttccgtaatgtgtattgtggcaatgtcttatatttagtttatctgttcccggcagttgattcccagccctttatagatagcttcctgtatcttggtgcgaaaactctcctttaccagtttgttgtcaaactcgttggggtaagttcggttggacatgaatatgtatatcaggtcattgtccggatcacaccatgccatgatgcccgtaaagcctgtgtgtccatagctgttcagtgagctttgtttgcagacgggactggcctttgtcgtgtccggttcaggtttgtcaaatcccagtccgcggcggttgttggtaaagcagtcattgcgcttggtaaaggtttctacggtagcagcagtcagatagcgttcgcctccatatattcctttgttcaaatacatttgacagattttggccaaatcctctgctgtggagaagagtcctgcatgtccagccactccgcccataagtgctgccgttgggtcgtgtacggagcctgataattccgtctttctgtacagtcggtcattgcacgacggtatgatgcgcgatttggtcaggcgctccgatgctttatagtccgtattgttcattcccagacggctgaaaaaacgctctttgcaatatctgctgatgctttctccggttgtttcttcaacggcatgttggagcagtatgaagccgaggtcgctgtaggcgtatttgggggaggttgccagtggtgagtttagtatagcatattctatcgagtctttgtaggttggaaatatgtacacacctggggaaacaaattgatatccttctttgggtttgttcgcaagggtgctatctttgaaatggaaattcggatttacatacagccggtctttcaaacgcagtgtattggtcggagtcttttttacagtaaacaatcttccggacagtgattttttatcgatagcattgaggaacagggatagcgaaggttttaaacctgcatggtggcaaagcacttcccttacggtgatgtcttttttgtctgttgtcgtcagttggttgtaataacggctgagcggagcatctaggtctatgattttttcatcatataatttcataacagccggcaatgtagccgttatcttggttactgatgcaatatcataaatgtccgtagtggtgtttgcttttttcttggcgtatgtatgatatccgaatgctttgtcatagataacgcttcctttgtatgccactaatacctgacagccgggagttgcatggatagaaacggcccgtttgcatagagagtctattttcttgaaactgccggctgataaccctttgctttccggcgattcgtagctgagacgggtcttgggtgtacagatgccacagccggcacgatagaccgagtcgatacttacaggcagttgtccccggataccgatacctccgaatatggcttgggcagcgtattgttgggaatatagatgtttgtcataggatactaaaagtgcgtccggatttgtagagaggtaaggtttcaatccatagggaatggcgggttggcatataatgatgcgtttgcctttcagtttttccaccagaagttttagtgattccgaatagccgaattgccctttggcagaattgttaccggcttggttatatatgatgatgcagttgtagtgcgccagttttttttgccagcttgccacttcttcttctgacagtttgcgttttgcagtaaagttgctcacttgggtgtagcgttgcagcatggtttgaaaattgtttaccttatcgctgccgaaattgatacttgcaattttcagagtatccaaacgtttaagcggtagtagtgaatcattgtttttcactagcgtgatagcttctttgtacaggcgttctttgagagcgatgtctgtcgccggattaaggcgcgaccatagtccggcctcctccgacggatgcaggttgtgtagtgcatacgtgtatttgcatgcgagtattttccggcaggcctctgttatcatgctttcgctgatttcctgcgctttaacggcctctttgattgcggttactgctttggcaatgtcttgtgggaatagtagcacgtcattaccggccaacagtgcttttacttcagcttctccgggaggggtattatcggtcactcctttcatattcatggcgtccgtaaagcagatgccacgaaatcctaaggtgcctttcagaagattgtcgacaatgataggggagagggaggctggcacacctgtactgtccagagccggtacattcagatgcgaattcatgatggcgggcacctctgcttctatcaaggcccggtatggatatagctcgatggaatccagtctcctgcgcgagtgcgaaatggtgggtaatgccttgtgtgaatccgtatccgtatctccgtgtccggggaaatgtttggctactggcaatacacctccagcgatggagcctttcatgaagagaatggctttttgcgacacttcttccggatcttctccgaacgaacggatgcctatcaccggattggcaggattgctgttgatgtctactacgggggcaaaattgacatggactcccagttcatggcagtggcgggcaatggtttctcccaatgcaaaaatcagactgtcatttcggatagcaccgattattcccatctttggaaattccatggcgcttttgagacgccagcctgcaccatgttctgcgtccaagccgattaacaacggatatttggctgctttttgatagcggtttgtcaatttcacctgacgggtcggatctccttgaaaaaatatgatgccaccgatgtggtatttctttatttgttgttcaatgtctgcctcatgagtctcgctttgattactgtatgcggcaatcataaacagttgtccgattttttcgtccagcgtcatgctctggaggattgagtctgcccagtgttcgttgaaatatgtggcattatgagtttgtgcatagccggtggcagaaagaaaaaatgtgataatagttataaaaatccccgttttcatatttctcgctaaatatggcgcaaatgtaacaaaaagagagggtcttgattcttcaagaccctctccatgtttataacaattgttaaattacttcaacagctcagcaacttttgcttttaaagcttcgcctctcaagtttttagcaacgattacattgttttcgtccaaaactaccaaatgaggaataccgtttacaccatacaattgagcagcttcacagccccaacctttcaggtctgatacgtgattccaagttaagttgtcatctttgatagctttcaaccaagcatctttgtcgttatcaagagatacgctcaagatttccagtcctttcggatgcaattctttgtacatagccacaacattcgggttttctccacggcaaggtccgcaccaagatgcccagaaatcaatcacttttacttttgccttgattgagtgcatagaaagaggtttgccttccggagtgttcagtgtaaagtccggtgcaacttttccgatagcaacagctgccagtttctggattctgtcaccaatcattttacccggttgagtagctttggcatttgctcccagcaattcatatttagcctgcaaatcttcaaattccaatccgcccatttggcttgccaccatataggctgccacgtatgagtctgcgtttgctttgattaaagcgtctgcttttgcagctccgtcttctgctgctttgttgaaatcagcctcaatttgagccattttttctttatcttcggcttgtgaagcttctccataagctttgtataattcgctctgtttctttttgatttcagtgttgatagccatgaaatcgttgtatagcttctgattggctgttccttcgattttgtttccggccggatcattcatatttaatgtagccgtgtatacggtattttccaggaaaatcggcataccacctcttttgccttcaatcatcaggtaagcgtctgtcaattcattcacggttcctgacaggacgaatttaccttctgcaatagcagctttggccaaggtgtctaatttctggtctgcttgttttactaaaataacgtttccggcagtttctccggcgattgttccgtttactgtaaatttcggagttgaattacatgctgccagggataatgcgatagcggcaataggaaatagagttttcttcatggttttatgaatttgttctgatatttaacaaacacaaagatagggataaaaatgacaaaacgatgcgagagcatcgttttgtcatgttaatatttagttaatctttcgtttcataaaccagaattctttgaaggctatatttatgcgcagtttggcaaatttttctcgtaccagaccctccttttcagttcctcgcacgccaaagtccagagctactcctaacaatagggcattgttctgaatataaaatggcatttgtgcccctaaggtaaatccgtaagtgcggatatctatatccttgatatgtatttcggaatcattgaagtaggctcctgccatataggtattgcgttgtctccagaaacgtcccatctcttccggtgtccaggatattcccaatgctgccttgtgggcattttgaagattttgtttgacaccaaactcttcatagtcggacattttctggaaagtatagtcacctgcgatttgcagtttgtttttatattcataggtcagaccgctgttgattctgaatgggtatttgatatagccccgcttcagggtttcgtcatccagcatggtggatgttccggtgctatgtactttgtaggaaatgaactctttcttggcccacatccgttgtgtaaagtttatactggtacccagagttaggtttgattttggtgtcatcttgaatttatactggattcccggattgaacagaatgtcgtgtatgcgtacgttctcgctcgtgcggatgtaataactgctgggcatgttggctgccagagtctggcgtttttccaatttaccgaacacatacgagaaattaatacctaaagacaggtttttgtatctccagccaaaacctgcatatatatcattcaagcctccttcgccttggatattctggttgaatgttgtattggcgcttccggaaatgcggtcgctgtacaatatgtcgtatcctacgtctgacttctctgtaaagccgaatgaaaaatagagctttttgtatagccgtagtgccattaccagataagcgttttgggctacattgtaatgggacgactccttgtgggtggatatccaggtgacttcaccgctcagggcggcttggaagttgaacctcattgagtccagtgccgtatatgcagcagggttcaggaaattgatattccggttgtcacgcatggctgccgatacaccgcccatggctgtatagggaccgttgttttccggttgcagcccgattccgtacaaggaataaggagaaccgctattgtcctgaccgtagacatatatggataggatagatagaatgaacaagcttataattgttttcttcataatgcattattgtttgtaattggcataatagaatcttacgacaggcgtttcagttacaatcagttgatcgtatgacagattcatgttcggaacgctcaaaagtatctgctgtccttctgtcttggaaggatttgcacttaggcgttggtagtattcggtcatatcgaagacaaacatgctcttgttaggattggtctggttgatttgcagcaatccgttcactggattgtctgtattgtttgccagtctgccggtaattctgtttaaatcgtcagaagtatatactgctatgtatggcggaaaaccgagcggtagcttttcgatatactgtacgttgacttccagttgcgccttgatgatggtggaatagacctggctcttgggtacgaccggtaatcgcagtttcaccatatagccggtcaagccttgtgtgatggcctgttctgctttgttcagagatacggtgcaagtgtcatcttccagactttcgtatggagtccctttcctgtctgtttcgaacaggttgaactgcatattcaattgtgccaatgggaaacgtagttttctgatcgtatcatttactctgtaattgaattgtaagtacagactgtcagaacgtgccttgatagagaaaaggcaggtgttgtcttcgtctggtacaatggcgagtcctttgaaatattccaggaatttcaaaaaagaatattcactactgttgctttcttcatagatgtcatcggtctgtttgtaacggattctttcaaacaggtcgtgggctaatgtatcatctatacggaaataggagttgttaatacccgttacagtagggatgaatctgttttcaccgatacatgaatccagctttatcggtgtattgttgtaaaaatatccgcctctttcgtaatcgaactccggtagttttttcagttggtataaacgtagaagctgttctttacgctcgaaaatggtatctccccacatattaccggcataatgaatgtgaaaggtagtggagtcaagtactgcattggctgcaatcttgggatagctcgccggagtaatctggaaacacggggttgccttggtaattcctccctgtgctggggtttgcttgtcttggtattttcctacaatgagtttggtgatgttgttttccgggagtccgtatctgcctttggaggtgacaaatgagtctagtcggacggtcgctacggatgttaccgggatttccatctcttcaatatagtttccattgaccaccatatcctgcccgattgtcttcaagtcgttgttgcaggcatatataaggaatagtgcgccaatgagccccaaacatattcgcttcataaatctttcgtttattattgataattggctgcgaaggtaaaattattttctaaaaattccttgcctgtcctttatattttactaaaagttaacgaaccggcaaggtttgttgctccatatacaaaaaatgggatgcttttgcatcccatttttttcatatttttatctgactgttaatagtcattgttgtcatcttctttaatgcccggatagaacacccaagtagagttgtcgtcagatgtagaggtagacgaacctccggtagtgatatagccatagtctccatatgagaatccgatagctcccatgcgggtaatcattgctgctgggaaaccggtcacttcgttccaacggtctctatcaatgtcatacagccagcaagatctcttggtgcctcctgcgataaagcctttgatcacacctctgtcgttggcagcaaaggcaacggcatagctgcgtggtatatcattgtaatcgtcattccattttccgctcaaatcctttagcggtgcttttgtgtgccattgcccgtcaaatacatgtacatctggacaggcattcgctgccgcccccaaacaaacaactgtacgttcgccgattgtgaaagttacggcacctacacggctgttgcccggaaagttggagtcgctccatttaccggttttggggtcataacaataaatggttttgaatacacggtttttcaactgaccggtacctacatatcccttaccgccatgagtaaatgcgataccgtctgcaaaagaacattcttccggattcttttcaaaatcggtgatgtcgatttttttgaaatctccgttatcttcttttatccattcttttttatccaagtcgaacagatagaagtcgctaaaatactcttcggtggtatgtcctgcaaacgtaccgcggtatccggctcctacgtatgcgatgcggtcaatcacaaaagctacagaacctttacgtccttctttcgggaaatctccatcggcaactttttgccatcctgcaccgttatatacccaaaaatctctcatatactggtcagcattcgtcgtcaggttactgttatatcccataccgatatagacatctccgtttttagggtcagtgaacgacacggcacacacacggttacctcccgagaattccactgattttgcccagtctccatgtgtatcatcgtttgaatcgcaggcaacaaagaacaagcccatcagagcaagaaataataaatttagtttcttcatacgttgttttttatcattaatgacttttatttttctcataaaacagggcaaaactacataatttttagtgagatttgcaagaaaatcaaaagataaaatcactcaaacaggaagattacatatttttaactaagtccgttttctccgaaagcgtttttttgtttctccctttcgcttctcacaggcgtcccaccgatgtctcactcacctctctcgtttctccgttcctcccccgaagttcctccgaagctagtccgaaccggaacgggttagcaacggagcagcttcccgtcgacatcggaggagtgagagaggggtgtaggaggtggtagagaggtgtcgggtagggatatatatgcaaaataatgggaggaaaatttggaaaacctccgtttccggctatatatttgtagccgttgaaatcagttggagataaaactatgttgatgaatagaatccggataattgtatttttcttgctattggcaacgatgactgtcaaagctcagtggaacaccggcagtatgctgcggatggggcagaatgccatctattttgacgactatgtgagtgctattgagaattttaacggaatcatccgggtgaaaccctatttgtcggagccttacttttttcgggggcttgccaagcagaatctggacgaccacgaaggggctttgtctgattttacaaaggctttggaattgaatcccaactattttcatgcctatctctatcggggtgtggcattgagcagtatgcagcgttttgaggaagccttggaggatttcaatgaggctatctcgctcgatcctgccgcagcgtatgcctatgcctatcggggaatgacggaggctgccatgggcaggtataaggaggctgaacgcgactattccaaagcattgatgttggacgaccagttgttggctgcttatctgaaccgtgccatggtgcgtgaaaagctggaaaagtgggaaggggccatggccgactgcaatgcggcaatccgtctgaatatgttttccgatgatgcctacggcttgcgcggatatctccattaccagcaaaaggattatcacaatgccattgaggattttaaccgtgccttgaaagccaatccggaaaacaaacgcattctgatgagccgcgccatggtgtggtatgagatgaaaaagtatccggagactctggcagactattccaaagtgatagatatagacagtaattacatttatgcttactacaaccgtgcgcttttgcgggcagaggtgggcgagaccaacgctgctatcagcgacttggacaaggtggtggaaatgaatcctgacaatatccttatatttttcaatcgcggattgctgaaaatggaaatcaaggactggtatggtgcatacgatgatttcaccgagagtatccgtctgtatcctgattttgtgaaggcctatctggtgcgttcggcagtagacgaagagcttaaccggatagaggaggcggaaaaagaccgttatgcagccatgcggattatggatcgttacaagcggatgaaggcaggtgacagaaatgcgctggtcgatacgacagccaatttccgcaaattgatagacatcaatgcccgtcaggacgaagtgcgggatgtcataaacggacgggtgcaggacaagcgtgtcatcatcgaattgcaggatgtcttttttgttcagtatctgagtctggattccttgaggagcggtaaggtacaatattacaacaagcatatcatggcttataatcaggctcacaattaccgtccttcgattaccgtgtgcaacaagcgtccggtctatccggagggctttgtgcagacaaatatcggcgaattgtcggcccgtatatccgggacggaaaaggcagacgactatctgttgcgtggcggtttttatctgagcagcggcgactattcggcggcaatcgccgacttttcggcaatcactgcccgtgaaccagacaatctgctggcattgttcaatttggcaaatgcacggatgatgatgtatgattatatcgaatctgtcgacgacaagactccgcgtgtggtgggtgagcgtcccaacgagattcggaaggtggattattcgcttgtactggaaggttatcgcaggtgtctggaaatcgaccctgatttcgtgtttgcccgtttcaatattggaaatgtctatgccaagaacggcgaaatagacaaggcgatagaggcctatacacaagttatccggcaggatagggaattagcggaagcctatttcaaccgcggtctgttgtatatatacatcggtcagaaggctcaggcgagcgctgacctcagcaaggccggcgagttgggcatcacaagtgcatataacatcatcaagcgttattgtcgggaggaagaataggggcggacggctatgatgcaagtctgaaatgcaatgaattatatcgaatgtcatcatgttgcagagaaagtcgccggtgtgatattgtcgttaaaacgggtttgaaaatccggtaactttttctaactttgcaataacataaaaactaaagccatgttcaggggaaatgaaattatccgatttgactgggcgatgaaacgcctgttgcgccagaaagcaaattttgtggtgttggagagttttttgagcgagttgttaggtgataaaatcaaaattcaccgcattctggaaagtgagggaaacaaggaaaatgcggacgacaagttcaatcgggtggatattttagctgaaaacatgaagggggaactgatcatcatcgaggtccaaaatacgcgggagttgtattatttccaacggatgctttacggtacggcaaaggcagtgacggaatatatgcatgaggggtctcgctattccgaggtcaaaaaggtgtattcggtgaatattgtatatttcgacctgggacagggcgaggattacatctaccacgggaaatcggtgtttaccggcatgcatacgggggatatcctgaagttgtcaaggaagcagcaagaggtgtttgtccaagaaaatgcgggggatatttttccggagtattacgtgttgcgggtaaatgagttcaaccgacatgccaccactcctttggacgaatggatcgatttcctgaaatccggtaggattgacaaagatacccaagtggaagggttgaaggctgcccacgaatgtctgcgggtctctatgctctccgatacggaacgtcttgcctatgaccattacctggacaatatgcgggtgcaatgggatgttctgaccactgcccgcatcgaagggaaagacgaagggtttgcggagggaaaagcagaagggtttgcagaagggagagcagaaggaagagcagaaggagaacggcaaaaacaattggaaattgcccgtgggatgaaagggaaaggtctaccaacggatttgattgcagaattaacaaaattgccaaaagaagaaatactcgaattataggcttggcgtaatcgtgtcaatcacgaatactgttccttttgacaatatgcgatatacttgtaccgcttccggtttgattgttcaatctggcaaatgcgcggatgatgatgtatgattatattgaatctgtcgacgacaagactccgcgtgtggtgggtgagcgtcccaacgagattcggaaggtggattattcgcttgtactggaaggttatcgcaggtgtctggaaatcgaccctgatttcgtgtttgcccgtttcaatattggaaatgtctatgccaagaacggcgaaatagacaaggcgatagaggtctatacacaagttatccgacaggatagggaattagcggaagcctatttcaaccgcggtctgttgtatatatacatcggtcagaaggctcaggcgagcgccgacctcagcaaggccggcgagttgggcatcacaagtgcatataacatcatcaagcgttattgtcgggaggaagaatagggacggacggctatgatgcaagtctgaaatgcaatgaattatatcgaatgtcatcatgttgcagagaaagtcgccggtgtgatattgtcgttaaaacgggtttgaaaatccggtaactttttctaactttgcaataacataaaaactaaagccatgttcaggggaaatgaaattatccgatttgactgggcgatgaaacgcctgttgcgccagaaagcaaactttgtggtgttggagagttttttgagcgagttgttaggtgataaaatcaaaattcaccgcattctggaaagtgagggaaacaaggaaaacgcggacgacaagttcaatcgggtggatattttagctgaaaacatgaagggggaactgatcatcatcgaggtccaaaatacgcgggagttgtattatttccaacggatgctttacggtacggcaaaggcagtgacggaatatatgcatgaggggtctcgctattccgaggtcaaaaaggtgtattcggtgaatattgtatatttcgacctgggacagggcgaggattacatctaccacgggaaatcggtgtttaccggcatgcatacgggggatatcctgaagttgtcaaggaagcagcaagaggtgtttgtccaagaaaatgcgggggatatttttccggagtattacgtgttgcgggtaaatgagttcaaccgacatgccaccactcctttggacgaatggatcgatttcctgaaatccggtaggattgacaaagatacccaagtggaagggttgaaggctgcccacgaatgtctgcgggtctctatgctctccgatacggaacgtcttgcctatgaccattacctggacaatatgcgggtgcaatgggatgttctgaccactgcccgcatcgaagggaaagacgaagggtttgcggagggaaaagcagaagggtttgcagaagggagagtagaagggagagcagaagggagagcggaaggaagagcagaaggaagagcagaaggagaacggcaaaaacaattggaaattgcccgtgggatgaaagggaaaggtctgccaacggatttgattgcagaattaacaaaattgccaaaagaagaaatactcgaattataggcttggcgtaatcgtgtcaattactgtcaaagaaaatatgaaaaaaagagtgccgcattgtgaatagtagcgacactctttatattggattggacgttcagattattttttccaattcgtcaatggaagcattgatttcatgctccgggatggtgtagtcgtgaagttttcctgcaaagtattgttcgtaggcatacaggtctatcattccgtggccggataagttgaagaggatggttttgctgattccttcctctttggcttgtctggcttcgcggatggcttgggcgatggcatgtgtggattccggtgcgggaataatgccttcggtgcgggcgaataatgttccggcttcgaaggtttcgagttgtggcatgtcggatgcttcaatcagtcggtcttttagtaattgactgacgatggcgccggcaccatgatagcgaagtcctccggcatgaatgtctgccggttcaaagttgtgtcccagggtgtacatcgggagaagcggagtgaggccgacagtgtctccataatcgtattgaaaggtgccgcgggtcagtttgggacacgattggggttcaacggcaatgatgcgagtatgggagttgccggtcagattctggcgcaggaacgggaaggcgatacctgcaaaattggaaccgccaccgaaacagccgatgacaatatcgggataatctccggttttggccatttgcagcagggcttcttctccgatgatggtctggtggagcaatacatggttgagtacgctaccgatggcatagttggtatggggattttttacagccatttcgattgcttcggaaacagcgatacccaaactgccggaggaatcggggtgttcgcgcaatatttttcgaccggcatctgtcaaggaactgggcgaagggatgacatcggctccccaagtgttcatcatgagtttacggtagggcttttgattatagcttactttgaccataaaaaccttgaggtcgataccgaagtgtcgggcagcaaagctgagtgcagagccccattgtcctcctcctgtttctgtagtgaggtggcggatgccttgtttgtaattgtaataagcctgtggaatcgctgtgttgggtttgtgggagcctatcatactggtgctttcgttcttgaagtaaatctttgccggtgtatccagggctttttcgagtgcgtatgctcgaactagcggtgtgggtctccaaattttgtaaagatcttgcacctgttcaggaatttcaatgaattgtttcaaggagaattcctgttctactagctcttcggcaaatatgggcagaaagtcctcgcgggtggccggacgtttggttttcggatttaacggaggtagcggcttgacgggcatatctgctacaatgttgtaccaggtcgttggcatttcgcgttctgaaagtgtgatttttttgtagtttttcatcgtaatataattttaagttgaaaaaatgcggaaaagaaaaacgcctgatgttcgtaataaacatcaggcgtcaactcatataattttagtcaatagaatcacataacctcatcgtttattacgaagttgaatggataccaccaccaattttgagctatgcaattctgtcttgtcatttctttgtatcattttgactgcggcgaatataaaaataataatttataattgcaagttcttgattattttattacttttgtttgaatcgtaaattgaaagatgatggagaattatttttatctgaacgagcagagggaacaaaagggtccatgctctcctgaggagttgctgctgaatggcattcaaccgaaaactttggtttggaaaaatggtatggccgattggatgccggctggagaagtggaagagttgaaaggactgtttgtaaccgaagagggcagtgtgccgcctcctattccacctgtaaccccggtagagccgagaagagagaagccggataattggttggtatgggcaattctttctacggtgttgtgttgccttccgttgggagtcgtttccattatttatgctgctaaagtggataatttgtgggctgcaggtcggtatgatgaggctgaaagagcttcaagaaatgcaaggttgtttttctttttgtctctgatttttggaatcgttggtagttttattgcttttttgggaggtatgttcagttttttgattggtgatgcagcatctgcttttggcgggatggatgttgggtatataaatgtctagaagcagcttttggaaaataggcggtgtcgcttttgttggtatgctcggggttttgttattctttgttgatcccgagcagtcttggtttgtgccgaagtgcccgttttattggttgacaggttgggagtgtccggcatgtggtagtcagcgggctgtacatcagttgttacatctgaattttaagtctgctttttattataatccttttctggtgatttctttcccgtatgtcatcttggttgtggcggtgaattggtttgatataaacaatcggatggcaagagtaaagaatgtctgttgtcatccgattgcggttattgtttacgggattttaattgtcctttggtggattgtcaggaatcttgtgtggtagtgttgacaagatgctctgccaatgcgcggatatcaatgccggagaaattaccggaagtcatgatcagaagtactgaattgttataatctttgcggtttaattcttcaagcaacaagttgttatctgtatatacctttaattctttgtttgcaaatccattcataacatcttcagtagtaattttcggaagacgtttgtgttgcaccacttccggattgaagaagacaatagcttcgtccgcagcgtccatcgtgttatggtattgtggcaggaaggcagcattcagactgctgaaagtatgcagctccatgcaggcaatgaggtggcgggaaggatattgttctttgaccgctttgatggtggcctgaagtttggagggcgaatgtgcaaagtctaagaagatggtggtctgtttgttttcggcaattttttgcaggcgttttgccgctccgttgtaggtggaaatagcttttagaaaagcttcgtcactgattcccagctcccgacaagcatagtaggctgcagagatgttttgcaggttgtggttgccgaatacccgtagcggagtctctccgtgtaacgtgagatttgtaatgccctctttgatggtgtgtggaaatgtgttgtaaggaatttgttttacggaagcgtcagctcttgcaagtatgttgcagatgttttcatcgtcttcgaagtagataagtgttcccccgtgtgtgattttttcaaggtagatggcgaattgttccacatagttttcgaatgtggggaatacattcatgtgatcccaggcaattccggtaagaatggcaatgtcaggatggtagtggtgaaattttggtcgcatgtcgatgggggatgaaaggtattcatctccttcgaatactgcaatcttactatcatcgctgagatgtaccatagtatcaaagccttccagcaatgctcctgccatataatcaaaggggatgttgcagttgtgcaatacgtgcataatcatggaggtggttgtggtttttccatgacttccgcctacaatgacgcgttttttgtcttttgtttgttcataaagatattccggatagctatatattttgattcccagttcctgagcttttagtaattcgggattgtctttgcgagcgtgcatgcctagaatgactgcatctaaagagggtgtgattttttcaggaaaccatccccaggcttcaggtagcagaccggctgcttgtaagcgggatttggagggttcgaaaatttcatcgtcagaaccggtgacgtggtatcctttgttgtggagtgcaagtgccagattgtgcatggcagcacctccaatggcaataaagtgtatgttcatatggttggatttaatgttcatatctgcgattttaaatgcaaatatatagcttttctattttgtggcataggctttgttaggatatgatgtgtaaattttgtatgatgaaaaaagttgagcttctgttttttttaagtgtgttgcttgtggcatgtgatccatttgagtatcatccttatgatgtgagattggatagtaagtataaggatattaaccggaaaaatatcgaacgtatccgggcaaaggataaggaaaatgatacggtgcgttttgcttttgccggagatacgcagcgttggtatgacgaaacggaggattttgtgaaagcagttaatagccgtaatgatattgaatttgtgattcagggaggggatttgagtgattttggaatgaagaaggagttttgtatgatgcacgatatcttgagtaaactgaaagttccttatgttgctattgtggggaatcacgatcacttgggttcgggagaggagatttatagagcgatgtatggcgatttgaatttcgcatttgtatatggtggggtgaagtttttgggaatgaatacaaatgctttggaatacgattattcaacgccggtcccggattttcattttctggaaaaagaattgcgggattcggtatctgtccggtatgaccgtactgtggcgatgatgcatactccgccggatgattttatttttaataataatgtgaagtatgtgtttcaggaatatctcaaaaagtttaagcatctgatgttttgtgtgcatgctcatacccatcggttgatgcagacggatttttatggggatggcattatttattatggtgcggatgcaatgatgcgtagaaattatctggtatttactattactaaagattcttatcagtatgaggtggtctatttctaaatggctgttttattggggtgttgtgggaatgtatttgtgtggcagtggtactgaggtgtgtgctgaagaaagacgtccggagcatgtgaaggtgaggcatgaaaaaaagttggaacgttataagaggaactgggcgagattgattcctcaatatgaaaaaatgcagttcgccggttctatgggattgttgtctttgggggtaggttgggattacggaagaaaagaacagtgggaaacagatgtttttttaggatatttacctcgctttgatggggataaggcacatattacattgactttgaaagagaactacatcccttggaaactgaatatcaaacaaagcggttggatggtggagccgtttactgtaagtatgtatatcaacaagattcttggagatgagttttgggggcgtttgccggataaatatccggagaagtattattcgtttgcaacgaatttacgcattaacctggcgttcgggcaacgtatcagtttaaaatggctttctcccagtctttcaaatcatgttacatttttctatgagtttgcgacaaatgatttgtatttaataagctatctgactaataagtatttgaaattttcggatatattcaatttgtctttggggttgaaatttaaatttatgtaacctttattatcgggatgacgtaaaaggtggaggacatttaccgagaggtgaggttcccctaaagacaactaagaaaacaggggcagattgtagggtaatctgcccctggctgtataagaaaatgattggaatcctaaagaatcatttgtggcataaattcaaaactattgtattgtggacgcagacggtctgtgttgtagaatttgctgatatctacaagtttttttgtgctggtaacaatttctatcggggcgttgtcgtagcgtccgttacgtagaattaccaaacgtccgtgcatgcctttggagattaagtcgagagcaaggttgccgtaagccatggggacaatggagtccatggcatccggattgccacaacgtaccatatagcctaatttttgattgatgacattgattgtctctcctttgttgaactgaggcgatagggcttttaactcgttggaaacatagtctccgattccacccagctttttatgaccgaacatatcggtttcttcgctttggaacatcatatctcctccacgataactggcgccttctgataccagcacaacggaatacttacttggattggtgtatctgtcttggcagagcagttctgccaagcgttcaatgtcaaattggtattcgggaatcacacagcgattggctgctccggctaatgtgggaagcatggcagagaaaccggcatagcggccaaatacctccaatacaagcaggcgttcgtgggaaccggcgcaagtgcgtaagtcgtgtgtcagttcaatggtacgggtgatgcaggtgctgaatccgatacagtagtcggttccgggcacatcgttatccatggttttgggaatggctacgactttgacaccttctttacttaagcgtacagcgtagctaagcgtatcgtctcctccgataggaatcaggtagtcaataccaatgaattccagatttttaagaacttcaggagtgagatcattgatttcgtctgtgtatttgtccttcagatgttcgggaactgctgctttgggaacatgtgaagcgcgggtgcgggatgagtgaagaaaggttccgccggtgcgtccagccttgttgacaatttcttcggtcaattcaaagaagttgctggagttgtctgcctgagggtcgcgaatggtgtcaacaagacctttccaaccgcggcgtatgcctattactttataaccttcacgcagagcacgaatcgtgacggcacgaatggcgggatttagacctggtacatcacctcctccggtgagaatgccgataattcctttattttttaaattcataatgttttaaatattattgttagtattcaaaattttgtgctgtggtaaaagtcgtgaaatatattgtaaaatgcaagaaaagttatatggaagtgactatatttgcatattaaattatagggattgattatgagtcattttgtttctttttgggaaagtttgggggatggtaaattcttgctgcttttgttggctgtcttttttttgttacatgtcatttttatgatttataagttgttgactttatcggtgaataaaaagcagcttggaaaagaatcggaggaaggagtgtctgtcattattacttgctcaaataaggctgagttattgtcagaaaatctggaggcatttttgaagcaggattatccttgttttgaagttattgtcgtagatgagtgttctgaagatgaaaccaagcatgttttggagcattttcaggaaaagtatcccaatttgaagacttcaagaatttcaccggaaacaaagttccggagaacaaaaaaactggcgattcatataggtgtgttagcagcccaatatgatattttattgttttcagagatttggtgtcgtccggcttcgtctcattggattcgttctatgcaggctgctttttcggaaaagactgccgtagtgcagggaatggcgaattatagtgaggaaataaagaataatgtcaagcgtttttttcgatgcatgcgtttttggcagacgggatggagagtgcgtatgggattgtgtgtagctggtgatggctgtaatatgggatatcgtaaaaaatattatcttgaagaaagaggatttaccaagaatactcaagaatatataggttatgatacagacatggtgaaggtgttgtctaaacatggagaggtggctatggcgaaagggaaggattctcttattacaatcatagaagatgatgctagagcctggaaagatgatttttcctattattatgcaacaaaacaaaagtgggatagaaaggctatattgggaggctatgtcgattatgtatttgaggggtgtttttatcttttatcactttattttatttgtatgagtgaatattggctctattttctggtgccgatagttgttgtttgtgtatttaatctaataatcattaatgctgggctaaaaaaactgggacagaagaaactttttgtatcttcgttacgtaatggtgtgtatggttttatttataaactatattactacacttattcagtatttgcaagaaaaaaatggagataacagatggtttgtcggagaaggctttggtcgactataagatagtgaagagggcaattgccggtgatgaaaaagcctatggggagctttttaaaagatataaggattcagtatattttatgatactgaagatggtaaataaccgtgcggacgcagaagatttgacgtttgaagcttttgaaaaagcttttggcagtttgaatttctattcacctcaatttgctttcagtacgtggttgtttaagatagcatccaataatacgatagattttattcgtaagaaaagggctaagttggtatcgttggagtatgatgatataaatcaggatgaaagaggatatatatatagtattccagccgatgtgttgacacccgaagaggagattgtgcggatgcaacgggcctcttttttgcggaaacaagtcgcaatgctaaaaggacgataccggcgcttgatagaactgcgctattttgacgagtattcatatgatgaaattgctgatgtattagggattcctttgggaacggtaaaggcccagctttttcgtgcccgggagttattacaaacagctttgtcgcatacagaaatggctcacgaagaatgattagattttttttgatattattttttttatgggtgggtgcttccgatttaagagctcaggtgctttctgctattgatacaatctttttttcaggagtggtgttggatagtggaacgacggagcctttgtcgggtgtgacatgtcgcttgggagagggaaagggaacggcttcggataaaaacggatatttcagaattcaattacaaagaggagatactgtccggtttacctatgtcggttatcgtccctgtctggttgttgtaccagattcgttggatgcagaggaatatatggtgggagtttttatgtcgcccgatacgttacagctgtctgaggcattgattattaggcgatggggcgaaaatcgaatgcaggacatgatgaatgcccgtaataatatgaaaggcattctcagacaggcgtatgatcctaacagaaggatggatgcggatatgaatcagaagatggtgataaatgaatatgctcggagtgttgaaatgagaggacacgtggatgttcgttttggtgtaggtacttattctttggatgctttcaggaggttgcgtttgcaaaagaatttgcgtgataataaagatgttttggatacgagagaaattgatttgttaaagaaaatttattatgtagaaaaaagaagaaagtaggttgtttgagtgtatataaatatatctttgcaatacaaaatgcttgtgtttaacagtacgcgttttgtaaatttattgtttaatgaagagtgtacttatgaagaatctttctattgttttgagtgttgtgttaagcgctttaatcgggctaacattttcagcttgtaattcacagaatcaaggagctgcaactaattctacatctactattaaaaatgcaggatctggtaatgttgcgcgcattgtgtatattaatacggatacgttgatgagtcaatatttattggcagttgaattgaacgaagcttttttgaaaacgcaagaagagcggagaacagagttgaatgtgaaggcaaaatcattagaccaagaggctgctgaatttcagcgtaagttagaaaataatggtttcttatctgaagctcgtgcaattgaagctcgtgacaagctgttggtaaaacaggaaaatcttcgtcgtttgcaagaggatatgattgctaagacagctcgggagcaaaatgagttgaacaagcagttgtttgataaattgactgtctttttgcaaaagtataataaggaaaaaggttttgatattgtattgagtactcagttgggaggaaatgttttgtttgctgttgacggatatgatattactccggaagtggtggctcgtttgaatgaagagtataaggcagaaaaaggaaaataaatattgtttttttatataggggaaaggctgagtaatcagcctttctttgttttatacagtaggtaaaagtatgcaggagaagcatagaaaaaaagttttcgaacgttattggaatcggaatgaaattgtttttcaaccaaagtttcctaaggatacggaaataattgtcattataccagtattgaacgattcagatattttccttacagttgattcgttgtgtcaatgttctcatttggagggaagtgtcggggtaattattgtggtgaatcatggagagcagttgccggagtatgtgaaagaagccaatagattattgacaagtcagttatatggttatgtcaatgagattgaacgagagggaatcgtatttcagattatggaagcatttgacttgcctgcaaaaaatgccggagtcggattggctagaaaattagctatggatgctgctgcctggtggttgtatgtccatgctaagtcggattgtccaattgcttcattagatgcagatacttgggttgatgctaattatacggatgcgataatccgttgttttaaagagagctccaaggctggagtttccatatcatatgcgcatcgtttgaatgagtgtaaaggggatatgttgacagccatagtgaaatatgaattatatctgcgctattatcaattggctttggcttatgctggtcatcctcatgcatatcattgtataggttctgcatttgcagtaagggctatggattatgtggcggagggtggaatgaacaaaagacaggctggggaggatttctatttcatacagaaattgatttctacgggtcgatatggggaattaagagaaaccaaagtttatccttctgcccgttgttcagaccgtacaccttttggtacagggcgttctgtgcagcagattatgacggaaagtacgtattttgtttataattggaatgcttttgaagatttgaagcatttctttgaagggattgactgcttgtataaagcatctccaaactatgtggaagaatatatgggtaggcaagtttgggggctgcaaaaatattggaaacaaatggaagggggacggttattggcagagataaatgctaattgtgcttctgtagagcagtttcataaacgtttttttgatggcttcaatgcttttagggtgttgaaatatttgaattatatgcatgagaatgattatatgaaaatagaggtgtcggaggctgtcagcaagctgttttctgcttatggatggccagagcaaagagaagacttggaatatctgatgttcttgaggaatttatagaaactgttttcatattgaatggattttttatctttgcacagaaaataaaacgggtttagaaaataaattaattatggattttcattatacactgaaaatagctgccgatccggaagaggtttttgcagctttgacaactccttttcagattgaattgtggagtggctatccggcagatatgaaagcagaaaaaggatatgtattttcgttgtgggaaggggatatcaccggggtgaatttggatgtcaaaatcaacagattattggtgcaggaatggttttttggagaacaggaagagcaatcgattgtgcgtatagagttgaaaaaggagggaggttatactattgttaatttggagcattcccacattccggaagaggtatttgaggaaattactgaagggtggcgggagtattatctcggagctataaaaggaatgcttgaaatgtattgaattggacttttcggtatgtaggtggaaataccgaagcagaaatagaggattgccggtaaaatgccggcaatcagcagataataatggtttctccagcgactaatagcgtctcacccttacgaatttttgcacgttttcgtgtttcaacttctccgttacggatcacttctccgttttctaccatgattttggcaattgcaccactctctgcaatttgaaggacttttagtaatttaattaattcgatgtactcatcagtgagtgtgaaattcagcattttatgtgatatttaatgttttgattaatgtcttcaaagatatagaacataccacaaagtagaaacaatccggaggggaagtatttaattttgccgctttaaatttacaaacctgttgtaaagtgatgacaggtaaaatattacgaattaaaaaaattctatgaagaaaattattttgttgttggcggcatgtgtgggcttcggttctgtatttgccgaagggtatcaagtgaatgtgttgagtacgaaacagactggtatgggtcatgtaggaaccgggatgaaattaggtgcggagagtatgcatttcaatccggccggactggcatttttgaagagtacgtttgatttttctgccggcgtttcttttattaattcaaatgtaaagtataaaaatggagattatgtagcagagacaaacaattctgtcagtactccattatatgtttatgcaggttttaagatttatgataatttttctgccggtatctcttttacaaccccatacggaagttcgttggattggggtaaaaattggaaaggggcaaacctgattcaagatattgcactgaaatcctatgttatacagcctacgtttgcttataaaattaccgaccgtttgagtattggtgccggattgaatctggcgattggtcaggtgcagttgtctcgagcaatgatgagtgctgatgaatttcaactgttgggaggaatagtaggaaagttacctactttgccgaatgaagataagcaaatggtgacagggatgatttccaaactaaatggttctgtaccggtatctgcaacattggatggtaaaacaaaagtacgtgccggtttcaatgtcggagttatgtatgatgtatgcgataaggtgactttaggactttcttatcgttcaaagttattaatgaaggttgaagagggggaagctatggttgattatgccagtttacaagtggaacaattgtttggagtattatctaaggtgactggaggtaaagtgacaatcccgcctttgaatgaaggaacctttaaagcagaattgccattgccttcgaatctgtcttttggggtgtcgtatcgtccaacagagcgttgggatgtagcttttgatttacaatatgtgggttggcatgcctatgattcattgaatgttgtgtttactccgaatgttttgaacgggtatacaattaaagcagaaaagaattataaaaatacggtaatagcacgtattggagcccaatataaaaccactgaacgtttggatattcgtgccggaatatattttgatcagtctccgattcgtagcgataattataatccggaaactcccggcatgaataaattgggaacttctcttggattgagttttgctcctttgaagcgtttacagattgatttggcatttttgtacatccatggtatagaccgtaatggttcatatcgtttgaaaaatatgattaccaatgtagatgaaacatttgaaggaaaatattcttctaatgcttttacagcttcgttgggtgtagcctatcgattttaaataaactgccgggttgtaagaaatatttgcctgaaagattttcgttacatcgggaaaaactttaattttacacgcctttaaggtcgaaaacgattacaatctataatattaatattaactaaaccatggctaaagaacaatttttagaaagacacattggaccgcgtcccgaggatgttgaggagatgttgaaggtgataggcgtgaaatctgtggatgaattaatcggacaaactgttccggaatctattcgcttaaaagaaattttagacttaccggctccgttgtcggaagatgaatttttggctcgtattaaagcgcttgccggcaaaaacaaattataccgtacatttataggacagggatattatgatacaatatctccggcagttattatccgaaatattttggagaatccagcatggtacacttcttatacaccttatcaggcagaggtgtcacagggacgtctggaggctctattgaattatcagactatgattctggagctgacaggtatggaaataacgaactgttcgttgttggatgagtctactgctactgctgaagctatgactatgatgtatggcttgcgtggtaaagagatgaaaaaagccggtgccaataagttgtttgttgataatcatgttttctctcagacaaaagatgtattgattacacgttctgctccacagggaattgagttggtgtttggagattataatgattttgaatttactgctgatgtattcggagctgtagtgcagtatccggcatctaatggtgatattcgtaattataaagcattggcagatcgtttgcatgcaaatggtgcattattgacagttgctgctgatttgatgagtcttgttttattgacacctccgggagaatggggggctgatgttgttgtcggatcttctcagcgttttggcataccgatgtcttatggcggtcctcatgctgcatatatggctactaaagaggtgtataaacgtaatattccggggcgcatcattggagtgacagtggatgctcaaggaaacaaagctttgcgtttggcactacagacccgtgagcagcatattaagcgtgaaaaggcttcatctaatatctgtactgcaaaggctttgaatgcaacgatggctggtttctatgcagcttaccacggacgtgagggtttgcaacgaattgcgcgtcatattcattcggctgctgttattttggcagaagaaatttgtaaatatggatatacgctgaagaaagataaattctttgatacaattcgttttgctttgcctgcaggggtaactgttgacatgattcgtgaagtggctttggagcgtcatattaatttgtactattgtgaatgtggatgtgtcggattgtcaacagatgagcgaatcaatgaagatgagttgaatgttattgttggtatttttgctgaagctgccggtaagaaagcagaaaaagtgactttcctggatgattgtacagtacttgatccggagatgttgcgtgatgatgaatatatgcaacagcctgtgtttaatatttatcattcagaaacagcaatgatgcgctatatgaagaatctggaacgtagagatatttctttagctacttctatgatttctttagggtcatgtacaatgaaattaaatgctgctgttgaaatgttgcctatcacatggccagaatttggaggaatgcatccgtttgtaccgatggaccaagctgaaggattccagcaaatgattcgtgaaacagagcatatgttggagaaagtgacaggatttgcaggttgcagtctgatgcctaattcgggtgctgccggtgaatataccgctttaatggtgttgcgtcaatatcatatttctcgtggtgaaggtcatagaaaagtaatgttaattccagcttctgcacatggaacgaatccagcttctagctcgatggcaggcttgcagataattgtaacagctacagacccggaaggaaatattgatgttgcagattttcgtgctaaggctgaagctaataaggataatctttttggtgctatgattacctatccttcgactcatggcatttttgaagaatctatcaaagaattaataacaattgttcatgagaatggtggtcaggtatttatggatggggctaacatgaatggacagtgtggtttgactagcccaggaacgattggagcagatgcttgtcacttgaatttgcataagacttttgcaatgcctcacggtgggggaggtcccggtgtgggtccgatttgtgtagctaagcatttggtagagtttttaccgaaccattcggttgttaaaactggaggtgaacatggaatacatgcagtgtctgcagctccttatggttctgttggaatgttgcctgtaacttatggctatttgttgatgctgggtggtaaaggtttgaagaaagtgactgaaatggctatattgaatgctaattatttggcttcgtcatttgaaaaattgggcttcaagattctttttaaaggcaagcagggacgtgtaggacatgagatgatttgggattgtaattcttttaataaagaatatggaatttctgaattggatattgcaaaacgtttgatggactttggtttccatgctccaactttatcattccccgtacatggaacgctaatggttgaaccgacagagagtgagccaaaagaagaacttgatcgctttattgaggctttgaagactatacgcgaagagatggtggaagttgcagagggtaaggctgataaagttgataatgtgttgaagaatgctcctcatacacataaagtattgacggcagatgaatggactcattcttatccgcgtagcaaggccgcttatccattggcatgggttgctgagaataaattttggcctcaagtaggacgagtggatgatggctatggagaccgtaatctgatgtgtacttgcgatcctttgtatgaataggattttctatttgaaatataaatccgtaaggcaaaaccttacggattttttatatctttaaaattcggtgaagaatataaagtatcatcattatcgtgtgaatcaattaatggcgatagggatactttaattgatttcgcaggcgttatttgaagagagagaaatttacacttccatattgacgatgttccgtgaagcgtggatgcttggaaaagtctacgcttgcaggatgttcaattataagaatcccactatttgctaataaatcgttttcaaagatagctgttggtatttcttgaattttatctaggttatatggtggatctgcaaatatgacatcaaatttatgcccttgtaattttttgcaggcaagaaatacatccgctttatacacttccattttgtcgaattttagctcttttgccattcgtttgataaatgcatagtgtttgtagttttgttctatggaaatgatttctgtagcacctcttgaggcaaattcataacttatgcttccagtgccagagaaaagatctaaagtatgtataccttcaatttcaatataatttgtaagtacattgaagatattttctttggcaaaatctgttgttggccgggcactgaaacttttgtctggaaagatttgtcttcctttatgtgaaccgctgattattcgcatttgtgtatgtttaataagtggataaacgtagagttgttcaattggtcgttttttactaattgagataaaggagcatagtttagaacagcaatatttgaaatatatttattgattgtttctatgaacatcggatcatttaccaggttcccagaaatagaagtttgtaaatcgtctggatttatttgggtttgttgtaaacaatttaaggaataataaataatgtcgttaacagagccatatgaataagagttgaataatagtatatcattactcttggtaagtagaatatcaaaatattgttcatggatatctataaaaaggtagtgcgaattgaacagcatatttgatagggagtaaatgataaagggataggcactatcaatgatagatattggttggtagcgagatgttagaaaatcaataaaacttcgtggttgtgcttctactaaatagctattaattgcttcaattttccgatatataagagtatcactttcgtggagctcaaaacatagacgaaacatttctgtaagagtacttttattaaatgcatgagccggaagaagcattttgttcctttcacacgaaagtacaaatacttttttgtattttaaatttagtatgggatcatttgtgatgaactgggttgctttagcgatagtagcttcatttaaatgacactctagaggttggtggtaaaatactagcaatctattgttaggatcgtgtacacaaaatgaaaatccatccgttgtataacggatggataaagtatattgtgtcgaattctcttgagagaaattattgtcaatataatatatgttctgcatgcacctgtttactcccagttacccacgttattgttagcttcttttaagctacctacttttaatcctgcaaatttctttaaacgaattctttctccattttcttgtaataattcttcgttgaattcgttgcgaagatcttcaaaaataaccatgttagttacatatgcttcaaaaacaggaacttcaataccagaatctgtccaaatggtagtagaacccattttgaattgatgttgacgttttgtaaaaggaacataacggatttcatctacttcaaattctttggggaatacattacctgcagcagctacttttacagtatctcgaatgattttaccttctttaatagcttgtgcttctgtgattcctttttccaaatcatcatcactcaaagaaccgatagaacgaacaactttgatagagtcgtatttaataaagttaataagagtatcaaaactcggagtatacttaccatatacttctttaaaagcctcttgtgctgtacgtatgtcttttaagcgctgtgtaattagttcatatctatgattcttgataacttgaaatctttgaggaaccatgatgctttgatagcatttgtaacccaggaaaatgataattccggcgagaacaatctggataataagctttttcatttttagtttatttttttgaattgtattattacataattatttattcaacacgataaagttaatgttaattttgtaactttacaccacgattcaaacgttatcgcgaaagtaaaatcttaatattgctcgcaaatttaggaaaaaatttagattaacggcataatcggcaattaattttcatgatgattcaaaaacattttagtgaaatagttataagaaagtttggttttgagctttcttcttctcaaaacgaggctgttgagaagtttacagactttctttttaataaagaagatgatggtatttttttgctaaaaggctatgcgggaacaggaaaaactacgttggttgctgcaattgttaatgcaatgatatcgttgaaatataaggttgtgcttttagctccaactggtcgtgctgccaaagtatttgcatcttatgctggatatacagcttttactattcataagaatatctatcgtcaaaaatcagcagcagatggtgagggtgtttttagtttgggatttaatacattatcagatgcagttttttttgttgatgaagcatcgatgatttcgaatatggatgtggaaggtaactttggcagtgggcgtttattggatgatttggttgaatttgtttataatgggcgaaataatcgtttggtattaattggggatgttgcccaattaccgccagttggtttaatgattagtcctgctttagataaacaagaattggaggctgcttataattttagggtaacagaagtgaatcttgttgatgtaatgcggcaggttgataagtcaggaatattgcagaatgcaactttggtacgtgcaatgattgggagtaactctgacagatttgtgttaaatcttatggactttcccgatgtttttcggattgaaggaggagagcttttggaagcaattgatacttgctatgggaaatatggggaggatgagacaattgttgtatgtcgttctaataaacgtgcaaatcgttttaatgaaggtattcgtcgtactattttatatcgggaagaagagttttgtagcggagaccggattatgattgttcggaataattatttttggggtgttgattatgagaaaatagattttattgctaatggtgatatggccacggttgttcgtgttgggaaaagtgcacaattatatggctttcggtttgcaaaagctgtattgcggattgatagttatgcagaggagattactgcttgggtgattttggatacgttaatgtccgatttccctgcgctgacatatgaccaattgcgttcattttatcatgccgttgaggttgattatggcgatatttcttcaaagaagaaacgatttgagaaaatacgagaaaatgaatattataatgcgttacaaattaaatttgcatatgcggtgacatgtcataaagcacagggtggtcagtgggatgctgtttttattgatcaaggttttttgactgatgatatgcttactgatgaatactggaggtggctttatacggcaataacacgtgcacgcaaacgggtttactttgtcaattttagaaaagatttttttgaataagtggcgatttgtatttaacaataacttttttgtatttgtaaagtacaaatagttttcatacctttgcgcattattgcaaatatttgtagttagcataaagcatattttgtatgcatgatataaatattttttgcgccagcaggactttagttacaaccaattttttttctacttttcacacatcgacatacctgctggcgcatttttatattaatgaaagattcgtttattgatagtatttcttaattttctctatatttgcctaggttaggtgcattaaaattattgagattacagatgaagataatatatattgtcatatttatatttttaggtatagcttgcagtagtaaggtggatgattatttatctcaagcagagcgttacattgatacaaatccagaggcagcactatgttgtttggattctgtaaaacaatttggtgagttgaatttgagcaaattaacttattatacttttttgcgttggcatgctatgtataggaaagagggtatgattgaagactttatacctagcgatcagtttgtggagtattggttgggaaaagaagatctttataaggcgggctatctttgtctatataatggtatttattatctttatgaatcaagattggataatgccgccatttatttatccagggctcaaactttggcattgaaacagcaggatagtgctcttatattttattcgtattattaccaaggaaagctttattatgagaataatgaattctataatggagagatcgcatttagaaaggcgctagaatatcgccaagagaagaagaaaaaagatgatttccattatatttttaaacttgcaaattgttatttgtttgtaaaggaatatgataaggcaagatatcattatcaatgtattttgcagcatattggagagtatggtgaagataagatggctttgcgtcttatgaatgtagctgaatttagcgaggaggataaggaagttacgggttatctgaaagattatctccgagaatcatttgaaaataatgaatatgtccaattgtatgatggtttggcacatgcagaatctgctttatctagagggcaattggattccgttgcaatgtatatttcgtctttgccaagtgatactaggttttggcaaccaagtattcgtttgttgcattatcgtttgatggggcaatattattttcaattgggggattataaacgtgcaggagaaatattgaaaagatacatacaatcgcaagatagtctgagaatgagtgcacataatgagcagataaatcatatgattattagttatgtccgagcaaaattggagaatgaggcaaatttattaaaagcgcagaaaaataaatgggctgcggggatcttggttgcagttattgtttgtcttgttgcattttttagtttttatctatggcgtaagagacgtgatgaacgaatatgggaagtggaacggcgagtggaaacattgcagaaactttgtgaattacaggaaggacaaacgaataaaatcaagtgtatattgatgaataagttagaattatctcgacgtttagctagtttatcatgtcaggaattacctaaaaatgtttcctttttgaaaatgtatgatgagatgttgggtggggtgcattccactgtattgaattgggaggaattttatttagtgatagatacattatatgctgatttccacaataaattattacaatattttcctgtgttaagtgagaaagaaattcaaactctttgtttgttaaagggaggttttaggaatgatgaaatagcctttgtgatggatacaggaattgcatctgtttataagcgtaggacgactattagagaaaaattaaatttagaagagaggatggatattttggcaggtgcagaaggtttgttggctcaaattgattgtaagtgaatgttaagagcaatccattttatatggattgctctataatataattactgtatccctaaatcggctactattgcatcaatttttgcttctgcttctgcctgtgctttatgaaagtcattcgttgtgggcatttgtgctcgagcttcgaaataaaatttaattttaggctcagtacctgatggtctaactgatattttacagccgtcagcaagaaagaattgtaaaacattgcttgttgttggaaaatccatgttgctagtttctccagttttcaaattaacggctttaagaatggaataatctttttttataatgatatcgctgccattaatttttgctggagtgttgtttctgaatttatccatcatgtcttttatttcttgggctccagttaaacctttgcggacaatgtatatcatcttttcttgtgaaaatccatattctgcatagatgtccttcagaaggtcgaaaagagattttccgttatctttggcccatgcagtaatttcagccatcaaggaggtggaagacacaccatctttgtctcgtgtaaatgctccgggcataaagccaaacgattcttctcctgctccaatatagccttcagcaccatgtttgcgtatcatgtcggcaatccatttgaagccggtgtatacatcgtaacaaggtagaccgtttttttctgcgatttcttttaaaagttcgctggtgacaatggtctttcctgtgtattcattgcctttcagtaggcctagttctcggcgacggtgaataatataccaagtaaaaatgatatttgtctgattgccattgagaagaatccactctcctctatcgtcttttgtggcaataccgatgcggtcgccatctggatcgcatgccattgctagatctgcatctacttctcgggctttatctagagctaatttaaaagctgcaggttcttctgggtttgctgaagcaacagttgggaaatctccatctgtaatcatttgttctgggatggttataatattggagaagccccaattacgcagagatgcaggaacgagtttataggtggttccatgtaatggtgtgaacacaatctttaaatcgtgttggcgtttgattgattctggagataagcttagtgttttaactgctgctaaaaatttttggtcaaagtcttctcctaatatttttattcgttcttggattccttcgaatttgatgtcttctactttgacatttttgacttcagcaattacatttttatcgtgtggtggaacaagttgtgaaccatcatcccaatatgctttataaccattatattctttgggattatgcgatgcggtaatgattactccgcctttacatcctagttctcggatcgcaaaagacatttctggggtagggcgtaaagcttcaaataagtatgctgtaattccatttgcagaaaaaattgcggcagttgtttctgcatactcgcgagagtggtgacggcaatcgtggccgatgcatactgctttttcttcttcaggaaacattttgttaatgtagttagcaaatccttgggtagcagcacctacagtataacgattcatgcggtttgtaccaactcccatgatgccacgaagtccccctgtgccaaattctaaatcattgtaaaatgattctattaattctgtaggatctgttgcattaagtagacgttctacttctgcttttgtatcttcgtcataagctccatttttccaagcttctgctttgtgtttcgctttctgaatgatttctttgttttccatagtaaatagtattgttatttatcctttccacaaagataaggaaataaaaaagctctgcaagtgcagagcttctaatatttttttgtgttataacgttatgaacgtttttctttaatcttagcttttttaccggtaagatcacggaaataataaattctagaacgtcttactttaccaactttgtttacttcaatctgtttgatgtacggagattccatagggaaaattctttctactccaacatttccagacattttgcgtacagtgaaggttttagtagttcctgttcctttaatctggataactacaccacggaaaatctgtacacgttctttgtttccttcaataattttgtagtgtacgcttacagtgtcacctgtgtggaatgaagggtgctcaactgggttttctgcagcaaatgcttgctctgcaattttaattaaatccatattcttcttttttatattaatttatcgagcgcagtattgctatggagactttcatgcaagagactgcgtacgtccttacgagggtgcaaatgtagaaatttaatttttgttttgcaagataatattaggaaaaaagttgaatcaacaatccttgatatgagggtgaaaacgtttgtattattttgaaggaaaagttttttaatttagaaaaagcttcttacctttgtaccggaggtgaggattccgagattaatagtcgggattctttttaataaaggcacttattggaggataagtgtcatttattttttttatctagtatgaacacaaaattataacggttatgagcaataaagtatcttatgtaacaaaagaaggattgaagaaattgcaggaggaattggaaagattgcagaatgtggagcgtccgaaaatttcaaaagccataggtgaagctattgaaaaaggagatatttctgagaatgcagaatacgatgcagcaaaagatgctcagggattgttggaggcaaaaattgcacaattaaaggacactattgcatcttgtagggtgattgatgaatcgcagatagatacatcaaaggtgcaaatgttgaataaggtgaccattaagaatattaagaatggtgcaacaatggcatataccttagtatctgaaacagaggctaattttagagaaggaaaactttcaattaatactccgatagctcaagctttagtgggtaaaaaagtgggagataaagtgttggttaaagtgccggcaggagagatggaatttgaaatcatggatattagtttataaataaatatcatggcatcaattttttcacgaatcgttagtggtgaaataccttcctacaaggtagcggaggatgaggattattatgctttcttggatataaatcctcttcagaaaggacatactttggtgattccaaagaaagaaactgattacatatttgatctctcggacgaggacctggcgggtatgatgatattcgccaagaaagtagcaaaagctatcggtaaaacaataccttgtttgcgtgtaggggtagctgttttaggtttagatgtgcctcatgcacatattcatttagtacctttgcatagtggtgacgatttgaatttttgcaatcctaaaaagcagtttcctgcagaggagatgaaagcatgcgcagaagcaattgcggctaatttgtaaatacagcataatgtaataatatattcaagattagaagaagagatttttctctacttttaatcttgttttttatttatgaagagatgaaaaagagagaaatgtataatgcctatgccgaattggaagggtacaattgtttcggttgttcgccaactaatccgtatggattgaaatgtaaatttgttgacgaaggagagtacgttacttgtcattggctaccttcagaaaattatcaaggtttttttcatattttacatggaggaattcaagccactcttattgatgagattgctagctgggctatcttttcacatgaaaaaacagccggggttacaacagaaatgaatgtaaaatatcgtcgtgctgtgcgtactgacggtggagaaatttggttgcgtgcaaaagtaacagatgtttcccgacgtttagtgacagctaaagttgaattatttaatgagaagaatgaattggctacggaagcggatgtcgtttatatgatatacccggaagaagttgctagacagcgactgcattggcctggtgttgacgcattttataaagaggattgataagattatgaagtataagaatattgtatgggattggaatggaacattgctggatgacttacaaacaggtgttgatactcttgcagaaatgttgtcgcgacgtaatattaaaccattgagtgtagaggagtataaaaagctatttggatttcctgtgatagatttttatgccaaagtaggatttgatttgcaggcggaatctatgcatgatttatctgttgattttgtagaaacatatgataagaatgcaaaagaacttcagttgaatgaaggtgttgaaaatgtcttagtctctcttaaagagtctggtcgtcagcaatatatattatctgctttgcgggaggatttattgcagcaaatgacggctgattttcatatatcttcgtattttgagcagatttgtggttcagataatatctatgcagcaggtaaaattgatcggggaaaacgaatggtcaatacgtataagttatgtcctgcagaaactttaatggtaggtgatactttgcatgatgcagaggtcgctaaggctttgggctttgattgtctgctttttacaggaggacataatgatcaggtccgtttgcgaaaagtagcccctacaatttctcagctttcagggttgttgaaatggttgaacgaatttgatgggtaactatcgtctatgataaagtattgagccggaacaaaatgtatttttgacccggctctttttgttttataatttatattgcattaactgtgcaacgatattatgatattctttttctacatctagatagttttggatgctgtcatagagtagcgcaatttcaacaaaatactctatcatggaaatttggccggcttctaaagctttgtttaaaatattctcattgcgttgtaatgagagtgtttgggcatattctgaacaagatacatacagtgcttcggcttggagatagaggtcttgtagtgttgctttcactatttgtttattatcttcaaagttgaatgctgtatattctgcttgggctttagcttgttttaccgtatttcgattttcccaaagagggatagacataccgatgcgaaaaccattcattttttccccactgcctccattgtggcgatagccaatgtcgaatttcggaaggctgagagaacggcttacttttattgattgttgcgctgattctgctgttgtactgagatttttcagattaggatcgttatttatatattcgttttccagttcagcaaaagcaggtaaagtgggtaaattggaaaatcgggtatctgaaaagttgatttcaacgcccccgtttaaggcttgcagttgttccagttgggcttttaaggcagcttgattgcgtctactagcattgtctgcgttgattttttccaatactattttattatattctaattgattggcatcaccattatcatatcgctgtttatagagtgctgcaaggagagctgcatttttttgtctattgtttaatagatgttgctgttggcgcaaatagatgatttcatgacaaactaattgagcttttaagagtatttgttggcgagttgttgcatacaaataatcggaagcatttgctttggtttttgtcaatttttttttgttgaagtacactgttggaaaatcgaatgattgtaccacagcaaattcattgacattgtttcctgtatttttgtctgtccataattgattgagttcgaccgttggatttggaagataatttccaactttagcttcaagtttttgactttcgttcaactgttgactggcttttagtgttttattgttgctttcaatgtttttcaagacattgtctatgccagattgtgcccatatcggtagcgataggcaacaaagcatgaaggtatatatttgttttttcatattggttcttatttttagtgggaattgtttacttgtacgttgtttttttgtcttttgtttaaaagataataaacaatcgggacgacaaagccatttagtaaggtcgaacttaacaaccctcccaaaatgacctgagccatgggactttgtatttcattgccaggtaaatctccacctattgcaagcggtatcaaggctagagcagatgtcagagcagtcatcaaaataggattcaaacggtctagagacccctggatgatactttcagtcagtcctagtccttctgcttgcagatggttgtaatgagaaacgagcaatatgccgttgcgtgttgcaataccaaataaagagataaaaccgatgatagcaggaatgcttatgattccggatgtaaaccatatactaataactccaccaataatagctagagggaggttcagcataataatacctgacaaggggacactcctgaattcatggaacaatatcaagaatatcagcagaatcgaaatcaatgatgtcaagaatagtgtacgcgatgctgtggcttcactttcaaattgcccaccatattctacatgatagccttcgggtaaggatatttgttcctctattgtatcttgtatatcgctgacaacaccttttaagtctcgccctgccacgttggctgaaacaacaattttacgctgaacattttcacggctaatggtgtttggtcccgagagagggagaatttctgcaacataatgaagcggtattttacgcccattggcatccatcattaattctccgatttcttccattgtcgcgcgtttttgatcatcgacttttactgtcaaatcgaacactttgccaccttcattgacttgtgatacaactcttcctgataaggcaacattgatgaattctgagaattcaggtaatgtgattccatattttgccaacatgtttcgtttcggatgtatctgtaattgtggtcgttcgatttgttgttccaatgttaaatcggcaataccgtcaatattttgtactgcgtttttaatctgacttcctaagttgaacaatttgttcaaatcaggtccaaacagtttgatagcaatatttgcctgtgttcctgatagcatagcgtcaattcggtgagagatgggctgaccgatttcgatattggcacccttgatggtccccagtttggcgcgaactgcagcaagaaattcatcgcgcgagcgttcttttaattcaaaaggagcttcgatttctgaggtgtttactcccaatgcgtgttcgtcaagttctgctcgacctgtttttcgagctacagtttgaacttcaggaaactccatcaaaatttgttcagcgagacgtcccattttgtctgattcttctaatgaaattcccggcatggtactgacattgatggttaacgagccttcattgaaaggtggcaagaaactgcgtcctaattggaatagcagaactaaagttactacaagaagtgttattgcgcaaccgataactacttttcgataacgtaaagcccaatctaatgatgttttgtatgctttttttagatgtcgggagacaaacggttcttgttcgcttttctttaaagcactttctgaagttagaagataactacaaagaacaggagttagggtcagcgcaatgacagtggatgcaaataatgctacgacaaatgcaatacccagaggaatgagcatgcgtccttccatccctgataaaaagaataacgggagaaagcaggccacgattatcagtgttgaattgagaatgggcatacgcacttctttggatgcttcaaatactatttttaggacagagagcctttcttcttttggcttcagtctattttcacgcaggcgtttatatacattctcaacatcaacgatggcatcgtcaaccaaagaaccgatagcaatagctagtcctccaagactcatagtgttaatcgtcaatcccaaggcatgcattacaaggattgccattaacatggagagaggtaatgcgaccaatgaaataatggttgtccggaagttcatcaaaaagaaaaacaatacgacaatgacaaagattgctccttcaaatagtgcatgctgtatattgctgatggagctgttgataaaacgtgattggcggaaaatatctgttgatatttttacatcgctcggtagtgtcttttgtaaatcacgaatggatgcatctagtttatctgtcagctctaatgtgttagtattcggttgtttggttacagttactaaaactgccggatgtgctttttctgatgcaagtcctaacttaggggctttggctccaatgcggacgtctgcaatatctgccagtgtgataggttggtcttcaattgtttttactacggctttccctaattcttccacattggttgttgccaagactccttgtacgatatattcattcccatattcatacaagatacctccggtagaatttaaattcatgttttctgttacagctaaaacctcgtctgttgtgatgccgtagtgtttcatacgagcaggatccagtagaatttgatattctttgatatcgccgccaatcacggcaacttgtgcaacgcctccggttgataagagacgaggacggatggtccagtctgcaattgttcgtaaatcttgtagtgatgttttttctgctgtcagtccgataatcatcatttcaccaagaatagatgattgtggtccgagtgtcggctgaccggcattgaccggtagggcatctccgattgttgctagtttttcagaaacaatctgtcgtgcagtgtagatatcggttccccattcaaattctacccatacaacggagaatccggttgtcgaagaagagcgtactcgtctaacatcggtagctccgtttacggctgtttctactggaaatgtcacaaggcgttccacttcttctggagccattccttgggcttcggtcataactaccactgtaggggcatttaaatccggaaacacatcgacttccatgttgtgggcagtgatgcttccccatactaataaggcgattgccgccagcattaccaacagcctgttgtgtaatgaatattgtataatcttgtttagcatagaaatcttgttgttgattaatgattatgagtatgtccagggatggctgcactggcagatgccatttttacttgataggctccttgggtgacgatgcgttctcctgggtgcagtccacttaggatttgaacatttttaccgttatttgctccaatttttacttcttgcttttgataaccttcagcatctaattgtttgtaaacgtagaaatatcccatttcgttggtcagtgcggagacaggtatactgatcgtattttctatgggagctgaaatcaaatatatttcaacgaaagaaccggggatgacatctccttggttgtcaaattcaaaggtcaccggaataaaaaaagtgttttcgttggcagccctgcctacagataataatttacctgacaactgcgataattcataaacacgattgtcatagggcgtttgaaagtttgctgaactgatgttgtgtaatgaaggataatggcgttcagatacgtcagcgcgtaatattaaccgtttgttctgagaaacggtggcaatagcctgacctgctgccacatattctccatcttttacagagatattcttgatgtatccattaagaggattggtgatacttacacctttgccggattgtttgtcagcgatggcatcatatgctattttagcattttggtaattgagagtaatggattcaaattctttttgtgagatgattttatcaccaactaatttttgtgcacgttcatattcagcttttgctttttggtagtttgcgctaattcgtgcataatagtctccttctcccagatttttggttgtgatgtaaaaaagaggagccccttgttttacggaacttccggcagctagtttgttgtctgcataggaaataactccgctggttgtagctacaataactgattcgtctccgggggcaggcattacttgtccggttgtttttataatttggttgaaagttcctgcattaacttcttctactttaaagtcggttcgggcagcttgttcttgtgtgaatatgatttcatcactgtgtccttcctgtccggatttttttgctgcgtgatcatgtccgtcatgttcgtggttgtgtccctctttttcgtgatcatgcccagagtggtcgtgtgctgcatgttcatgattatgtcccgtgtgactttcttgcttggtatttttgcagccgaaaaaacacagggctgccatgataataaatatgatagctttcatatggttttgttttattgataatacaggttatgttatcctcctttatgttaggatactttattaaattgaatgattgtatgaaaggaggtttttaccttaggaggcatgggaatgctctaaggggaatatttatagaattggaggggcacgtccagcctgcgtatttatacagcagaccgagtgtaatcgttcttgataaggaactatagaatttgtgaatgaagttgcttcttgggctttaatttccagacaatgtgaagccagaaaaaatgtttgaaggtaagaaatgtcctgcccttcgtcattttgattgagaattgattgtgtccggctgatttgtgtctgcaatagattgcggatacaattgtgttgattgtctgaattattttcatcgtgtgaatgtttgtcacatgcttgaccgtcttcacaatgaaaagagttgaagcaaatataatcttgatgatgatgatggggtacaaccgtaaatgtcagcattactatgctggctaatataaggaaaaagatggttgtgaatttctttaatttcatcattgattatatgatttgcatcttttgtctatgacaaaattaatgaatggtaggcaaataagcaagtgtttgttttatttttaaaacaatattaacagcctcgttataagaggataaaagagccgaaggctcctggggagcaactattcttgatgcatagtcaggaaccctctgatcataagttcggcacttgccggattggtggcaataggtacattatgtacatcacacacgcgcatcagcatttgtacatccggctcgtgtgggtgtttgcccagtggatcacggaagaagataaccattgcaatttggtgttctgctaccaatgctgcaatctgagcgtctccgccgagagggccggataaaagtctctctacttcaagaccggcatcctgagcatgtttgcctgttgttcctgtggcaacaatctcaaggcctacagattttagaaagtccatgtgtctatttaaaaatgctaccatctcagctttctttccatcatgggctataacagcaattttcatacttagattttttttagttttttatatgcagcagcaaaattacttatttacgtctaatttaagagatgcttggttgattattttatctgtatccttaaaaaattgttgatataattctttatcattttcgcctagtaactgtgtcgcttcaggttccggaacaacataatatcgacgtatgccatcggattctatagggcggtacacatagttacttagatagtgcatttggtaacgggtttttccgtgttctcgaatgagttttaaagaaatgccgatacctccgttggtgtagcgtttactttgatttgaaatgaaattacctaatgaatagaccgtgagaccggtcgtatctttcccttctatgtggtattccagaggttgtacaacatgtggatgagacccgataacaatatctgctccacatctgtgcaagaaggaggccaagcgtttttgttccatattagggtgtgtttcatattcgattccccaatgcatgcatacgattatattggttgcagtatctagacgagccttttctatttcgcgtgccatgtgaaaagtatcaatcatagagacaacctgtccagggggtacagggatgccattggtcccgtatgtgtagcttaataatgcaattttaaattgtccttgtcggatatatagaggatgttgtgctttccaagcattggaatcagtaaaagtgccggtgtgtctgatattcagagagtccaagtagtaaattgtgttgcgtatgccgttggcacctttgtcgcaggagtggttgttgttggttgtcaaaatatcaatgccggagcgtttcaggtcacgggctaagtgccatggtgcacagaattggggatagccgctgaaatttttgttggataatgtcgtttccagattgccgatgacgaagtctgcttttttccaatatggagcaatgtattggaagcaaggaatataattatattcctgaattgtttggttccatgctcctttaatttgaggttcgtgttgcatgatatcgccgacaaaaaagaggcgtacactgtcttgttgcgggatggtatctcgtgcaatccaaggttgggcggctatactgaatggcagggccagtaaaaaatagaggacaaattttttcatcaggtttaagcgtgtataaaaaacaaaagtgaaaggtagacctacctttcactttttgttttgtgtttgaatatgattattttgtcaattcgaaatcaaattcttcttcagaaggaggagtgcactgaccacctgaacaagccatgaattcaacgtatccaactaatttggctttgtctccggttacttttactctttgaaccattgttacagttccttcgaaatatttcaaatccatgtcaaaagcatcgctatgctcagtctttgcatcagttgttgctttgaattctcctactaattcgataccgctggcttcatcttcatccaaattaaatgtagtgggcagaggaccgccttccggcaatttggtatcatacaagtgccaaccgctgtttacagttgctttgcagatgatgtcgtaaacaccttcgcttacttttttgtgactgatttcccattttaccggtttcagaatctgtgcgttcagtgctgttgcaaatgaagcaaccaacacaactattgcaaataatcttttcatcgtacttactttttaattagttattgttttactcttcacaaagtaaagaaattaatcttaaaaacaatgttacttacgtgttaaaagacccttaattgctgattaaagtgtctttttaacttcaacctcctggtaagcttcaatcatgtcgccttcccggatgtcgttataattttcaatatttaatccacactcaaagcctttggcaacttccttcacatcgtctttgaagcgtttcagggagccgagagctccggaatagattacaataccgtcacggataacgcgtaccatcgcattgcgcacaatcttaccgtcacgtacaatacacccggcaattgttcccaccttagaaatcttgaaagtttcaagcacttcgactgttgcaatgacctcttctttgatatccggtgaaagcataccttccatagctgacttcaactcttcgattgcctggtagattacagaatagaggcggatatcgatttgctccttctctgccagtttgcgtgctcccattgaaggacgaacctggaatcctacgatgattgcattggaagctgctgccaacaaaacatcgccttcggtgatctgtcctacagctttgtggataatgttcacctgaatttcgtcggtagacaacttgattaaagaatctgacaacgcttcgattgaaccgtcaacgtcacctttgacaatcacatttaattcctggaagtttccgatagcaatacggcgtccgatttcatccaatgtgatatgtttctgagtacgcagaccctgttctcgttgcaattgttcacgtttattggctaactgacgggcttctttttcattggacatgatattgaatttgtctccggcttgaggtgctccgttcaaaccaagaatcaaagctggttctgatggaccggcagactgtaatttttcaccacgctcattgaacatagcttttacgtgtccgaaatattgacctgccagaattacgtcaccgacatgcatggttcctgattgtaccaacactgttgcaacatatccgcgtcctttgtccaaagatgattcaatgatagagccgacagctttcttgtgaggatttgctttcagttccagtaattcggcttccaaaagcactttctccaaaagttcgttgatattcaatcctttcttggctgcaatctcctgacactgatatttacctccccattcttcgaccagatagttcatgtttgccaattcctcacgtattttgtctggattggcacttggcttgtcaattttattgatagcaaacacaataggcactccggctgcacttgcatggttgatagcctcgattgtctgtggcatgacattgtcatcggcagccactatgataatagcgatatctgttacctgagctccacgtgcacgcatggcggtaaaggcttcgtgtcccggtgtatccaagaaggtgatggttcggccatcagataatttcacattgtaagctccgatgtgttgggtgataccaccggcctctcctgcaatcacattggtcttgcggatactgtcaagcaatgaagtcttaccatggtctacgtgtcccattacggtaacgataggaggacgtggcaacaggttctcttcattatcttcctcttcgtcatcaatggcttcttgtatttcaacgctgacaaattcaacggtgaaaccgaattcatctgcaacgatgttgatggtttcggcatcaagacgttggttgattgatacaaacaacccaagcgacatacaagcggagataacatcggttacactgatatccatcatggttgctaattcggcaactgtaacgaattctgtcagtttcaggatgctcttttccttctcttcctgttccaactcagcctgtagtttttgttgggcagcatcacgtttgtctcgacggtgtttggcactttgagatttacctttgttgccaagacgggcaagggtgtctttaatctgtctgtctacatcctcatctgagatttcagctttttcatttttctttttcttcagctttttcagcttgcgtttgctgtcttctatttttgagggtttgccgccaggagaatttgcgatagattctacctgtactttttcatcctgacgatgtatcctcttcctcttcttgcgggtgtcagtatcttcgtcattaatcagtgatgcatcgatagcattattatccggtgtgttttgtgccttttgctgatttgctttattggcttttctttgctctcgacggtcgcgttctttttcctgcttgctctttttgggaggacgggtgcgttggttaatcgcatctaggtcaatcgttccaacaacttttacatccttaattgcaggttgagtcactttaaacgtggtttctttacttgtcttttcattcatcggttcttcctcttcttccggctcttcttgctttttaacaggttccggttgttttttttctataatttccggcttttcttctttcttgggttctataattttctcttcaactggcgcttccacctttttctcttcctgtggagcaggttgtggtttttcaacttcaacaggaatggttactggtgccggtttgtgttctgcgtccaagtcaatgtggtcaacaattttgatattgttggttagtttgacttcatctttaactgaaatgaattctttttctacaggagcttcttcttgttctgtagaaacattgcctgattcatcaattgatatggtttcttttttcttccggctcgtcttcaagtcgatggaagaggattctttcttcacctggctgtctgatgagaaggcttttgcaactaatgcatagtcttcgtcagtcagtttggtgtttgggtcagaggatattttactccccttcccatgcaggtagtctacaattgtagctatacctacattaaattctcgtgctactttacttaatctttttactgccatattaagattacaaaatttactaggttaatgggggaattactcaaattccgctttcaggatactgaggacgtcgcggatggtttcaacttccaaatccgtgcggctttccagctcttcctcgcttagttccaatacactcttggcggtgtcgcaacctacgcgtttcagctcatcgattacccaaccgtcaatctcatcagcaaattcttccagattgacatcttcttcctgtgcttcgtccaattcacgatagacatcaatatcgtatccggtcagctggcttgccagtttgatattcaaaccgcccttaccgatagccaaagatacttcttccggatccagataaacattggctttcttctgagcttcatcaatttcgatattcttgatttttgcagggttgagggcacgggtgatgtataactggagattgttcgtatagttgatgacatcaatgttttcattgcgcaattcgcggacaataccatgaatacgtgaacctttcatgccgacacatgcaccaaccgggtcgatgcggtcgtcatatgattcaacggcaacttttgcacgttctcccggtacgcgaaccacatttttgattgtaatcaacccgtcaaaaatttccggaacttcattttcaaacagacgttccaagaatacaggcgatgtacgagacaatacgatataagggctggaattacgcatttctacacggataacaacagccttgatagagtcgcctttcttgaagaaatcgctcgggatctgttcctgcttcggtagaatcaattcatttccttcgtcatccaataccagaatttcttttttccagacttgataaacttctgcaatgatgatttgtccgaccttgtctttgtatttattatagatattgtctttttccaattctaaaatacgggcagacaggttttggcgtagagccagcactgaacgacgtccgaagtctttgaatttcacttcgtcggttacttcttcaccgacttcataatcagcgtcgatttttttagcctcactcagagttatttccgtattttcgttttcgagttcaccgtcttccacaacagtacggttgcgccagatttccaagtctcctttgtcaatattgatgatgatgtcaaaattttcgtcagtgccgtatctttttatcagcatatttctgaaaatatcctccaacactctcatcagggttgcgcggtctatatttttgaattctttaaattcagcgaacgaatcaatcagattaatattttccatcgtgtttttttagctttatattttaatgattattgttttcagaattttacgacatcccgaatttctttgatatcttctctttgtatgacatctgtgtgggtgacaagttgctttttcttgcttccttctacagattcttttgtttcgtattcaatagttacgctgttgctgtcgaatgcttttaaaagaccgtttatttttttgccgtccttcaatttggcttctacagatttgttcaggtttttagtaaactgaccatccaccttgaacggatatccgattcctgcgctggatacggtcaattcaaaatcttcctcatcccggttcatgtgcgattcgatttcacggctcacctcgatacaagtttgtatattcactccgtttaatgagtcaacaaacagttcgatgacgttgtctcgtgacactttcaaatctactaagaacagatcccgattactgagaatcgggtttgctattgattttacgtattctatctccattatatttgtaattgttctgtcggtccggtggcaaggcatcctttatgattaggtaaaaagaagaggggactccagtcccctctcaattagcctcgctaagtcactgcaaatatactaataattattgaaacagaaaatatttgcagggaaataatgttttcttcaaaattcatatctattgtttgagctacaattcaggtaaataaaaatgcgggacagtaaatgcctcccgcaaattgaatagatgtttgtaaaactcttgcttttcgacctttttcagttcttcgaagaattctttcacgtagtttttgagtgttcatcggcattagcaatgatttgtttccactctgtttttgttgccttttcttgtatggcttcgatggtcagcatcagtactcaaatgttttgtctgatgcctgtcgggcgaagaagatgacttttttcgtgtcctaggcaaacccggcttcaaggatatcaatattttaattaattctttatctgccagtagaaaattatgtcactaaatgacagttttttcgattagacttgtgccgtatgaaggaaaagacgtatctttatagtcggaaaaaccgtcaccatatgacataaaattcgattagaaatgaaaacaatagaacgaaagagatacctgaatgaactcatttctctgcgacacaacggaatgataaaagttataacaggaatgcgcagatgcggaaaatcatatctactctttgagatatttacttcatatctgaaaaacaatggtatagattccgaccatattataaaagtagatttggaagactataagaaccgaactatgagagatccagataggctatacttatatgtagaaagccgtatcattgatgataaaatgcactatattctgttggacgaagtacagatgctcgatcatttcgaagacgtattaaatggatttttgaggattcagaatgtagatatttacgtaacaggcagtaatgccaagttcctttcaaaagatataattactgagttccgggggcgtggttacgaggtaaagatgtatccacttagtttcagtgaatatatgtcctcttatcaaggtacgaaacaagcaggtttcaatgagtatatgctttatggcgggcttccacagatattatcgtatgaaacagaggaacagaaagttcattttttgaaaatgttgtttgaagagacttacatcaaagatattaaggatagatatgacatacgcaaagatgatgatttagaagaattaataaacattatggcttcaggtatcggagctttgacaaatccaaacaaattagctaacacattccgaagtgagaagaagtcggtcatttcttatgatacaattaaagattacatcgactatctttgtgattcattcttgattgaaagatccacccgatatgacattaaagggaaacgatacatcaataccccatacaaatactattttatggatttaggtctgcgcaacgcacgaattaattttcggcaatcagaaaagacgcatttaatggaaaatatgatctataacgaattgagaatgcgtgggtttaatgtggatgtaggagttgttcctgttgtaacaaaagacatagagggaaaacaacatcgttcaagccttgaagtggattttatctgcaatcttggaagcagacgctattatatacaatcagcttatcgaatggaatcagacgaaaagataaaacaggaacaagcctccctacttaaaatagatgattcgttcaagaaaatcatcattatcggggaagaaagtcctgttatcagaaatgaatcaggtataactactataagtatttatgacttcttgcttaaagataattccttggaactataaaatgtacgagcctaattgtagtgcttttatatagatgtttaatattatatttgctatattttaatgcgccattaaaacgtggccaaaatcattacgacatattgagagtttgcattggtgtcttgacagaaatttactgcaagataaaataaaacggaaaacagagcaggctgctagaaatcttgacacaattcaaagaattgtactaaacattattgcggcatggaaaaacagaagaaaaaaagtagcggacaaacagaaaggtgttgctgaaattttaagagaattgtctatgaactttacaaaactgatacatttcctcaagcaaaaataagaaaaaatgaatttttaatacaactataaaacattgatttacaacaatatttaatcttacctatactagattgtatgggtaggggatgcctacccattactcagaagttaaatgcaagagccgtgtagaaatcccatatagaagtagtcaataacttatgggtctccgctaagattctctaaaaacgaatcagtaagttttttttatttttattgttgctgctttatcatcatagaggcgatctataaattccagctcatctaaattctgattctgattaattaaaagccactgaccctggatgaaaaggtttgatttcaaaattaaaagtttgtcatttatggtgtattttaatacctctttttgctctccataatgtacttttgctgttgtatctgacaagaaaaaaaacgtcaattttgcttgtcttgaactacttttgaattcaccttcccaaacagactgggaaaaaaagtcggaagcaaggttgatttcatcattttcttcttcatcattacaggaagcaaacaaatatgggtatacaaaaaatgtacataaagcaataatatatagacattttgttttcatactaatatgttttagttacaatccaaaaatacgataaaattgatacaatgatgccattgaaatctttttttccggaatagtattaatccaatccaacattccatatacctccggtatatattcatctgcataatatgcaaaagctatttttgcaacactatcataaatataccacatccctgtttctatattttggaatttatttaaacggctttcgtccaacttgctaaggtcaaagttcaagggtacacgcaatattggtgtgagtattttggacggttcagctttgatgaggcattggtagtagcgacttttatcctttaatatggaatctgccctttgtgtaaaaatttttgtgtcattgtttgctcttaaatcctcatctgtcatactccccaatccgtcattcaaaatcaacaaatccccctgacgggtatttaaaaccggagccaccttatacaacttttcgcctcccaccgtttttacatatactttcatgatttcaataaaaggttcgataaaacgatcgctgctgataaattcgttatgcgtatcatttatacgttgcctaaaattctcttccaaaataaaatctgaaatagggtgaagtccttcatccaagaatcctgtcaatacatgtgtattctcgtcatttagcgaatgtagccaagttgacaagtctaaagtgttggattttatgtcatttgccggagtgtttacctgataatcatagctacctccttgcgtagatacgcaatagtatgcactattaaaattattattttccattattgatattacagatgcgggcgcaaactccaaattgccagaaacggaattggatttccagctataagaggcatccactactttctgcatattcttttcccgagttttttcatctatcaaatttttggttatgccatagactagtccggatgctcttccgccactataatatttggcaataacaaatagtccgtactcatcaataatattctgaataggtacattatacaatgcctccatgaattccggatacaaatagttcgctgcaattttcttctttacattggaaagcgtctgtaatttatgttttttatgtctcacttctatttctacttctccgaaggcactttcctgttcttgcaccatgtggcttgaaaacttctctctaattatttttttacgtcccaatttaaacagtcctagattcaaggaaaagcctttgcttactttctttgtgatttccgaacgctcttcaaatcgcgcaaaagtggaataagcacttgttgaagaatagctgaatctcagaaagtcactcaaaacatagttgggattatcctttttcaatctggcaatatcaataactccaaaaccgacattttcaacatctcccataattgtattaccaatgcgataagcacgtcctagatatgaatctgccggtaaagattctgcttttgttttactacctaaaagcaacatattaccttgctttacattaggtaaatctttacgtctttcctgcattacaaatcccttttcttcctcatttatggatgtaaaggaatcttcagaagagcatcccattaggatacccaacaccaacaaaccaaacaaatatttttgcataattacagttttaacaattcagacatatttattttacgcacagaccctgaatcaagatttgtaatttcccacttttgttcggagtcaggaatatcatttacataaacggttccatgccatactccgcttaacacacattccactccattgcaatctatctgaacttcatagcctgcactgattttataataattccaagtgtaggtaacattcaccttgcttcttggtggaatattcacgggaaatacagctttgagttttttgttaatcttttgagttgttggttgatatatggcatcataaggagcgtcctgacttggaatgatgtccacattcttattggtcacacccggacgttggaagcgcatagagtttgcattgcctaatataaaatttatattttgccgttcttcaaagctagactcttccgttacatccttatataactcaaaatcataagccatttctacattcttttcgttagtatagcctacagtttggcttatggttccaagatgttgtatataagcttctcgttgtgcatattttatattttttagtttaaatgtatccaatggtgttatctgatattcttgagatgccaacccggaataaactccgaatccattttttgaacattcatcaacttgaaaactgtagtaccctaattcacctcctggtatttcttccatttggtaacgttgaatataaaaataacctgaagtatttgctgcgtataaataccaacgagaagcataactaggatcatcagtcttgggcaacatcaaaatacgccgctctttacgtttgcccgcaattcgttctatttcaatccctaatgtcaggggagtcccatctgcacacgaatatattttataagttccggtgtgttctatcgtaaaatattctttttcagaattagcgacatcactcaattcaacttcgttgtctctacctcttgttgaaaggtatttgttgcatgctcgattctttatagtgaatttgaatcctttcatcttaaaaaaattggctccactggcatcataaaaatatggcatggcaacaatggtgtcagtatcgacataaggtgttatacattctgttattgattctattgaatcgtgttcaaacgtttttgtaattggagaaaaataggatatttcctcattctcaatatctgaacaagaataaacaaatagactgaaaaaacagactaagcctaataaaaaaatgttgtttttcataagctcacataatagttagttaaaagtaattgttggcaaatataaaagaaacaaacctataaaacaatgcttttcttaatgttttcttaaaaataacgtcaattacatgttttttctttagtttaagttaaaatgaagaaactgtgtccctgttttgaatatttcgagttgcttccttttcccttttacatttctcccgcttctctcccccttaattatatctcatctatatatcaaagataacataacaataagacaaagataacagtctgttatctttgtcttattgttgtcatatatttgacatctatttgcgttaagtttgtgtggaaggatggcacagccactgataaggggttggatagtggctgtgcgatatgtttattaatggttcatgcttaaaagttcgtcgatgtgggtgcggtcattccacagacggggaactttgtgctgtccgccgagtttgcctttttctttgagccagtcgttaaacaggttcggacgggcgattcggatgtgaagccgttccagtgaaagcatgcgtttggcttcatagtcggaatttagtttttggatttggttgtccagcagttcggcaaattgttcgatgtctgccggtggattcttgaattctatcagccattcgtgtgctccccgcttgccttcgcccataaagatgggggcagcggtgaattcgtagacatcggctccggtttcgtggcaggcaaagttgagggcttcggtggcgttgtctataatcacctcttcgccaaaggcgttgatgaagagttttgttcttccggtaattttgaatttatagggtttggtggaggtgaattggattgtgtcgcctatcatataacgccacaaaccgctgttggtagagataatcagtgcataattgacttcggtttttacatcttccagcaatacggtgcgcggattgcttttgcccagttcgctggtgggcatgaattcgtagtatacaccgtagtctagcattaataacatggaagagtcgttcgggtcgtcttgcagaccgaaaaagccttcggatgcgttgtaggtttccaggtatttcattttagggtccggcagcagtcggttgtactgttcgcgatagggcgtgaagctgatgccgccgtggatgaacagttccaggttgggccacacttcgtggaggttggctttgccggttctttccagtattttgttgatgacggtcaaaaaccaggagggcacaccggccagacagcgaacgtcttctttaatggttgtttcgcaaatcttttcgattttttcttcccagttgttcatcagcataatggaggcttccggtgttttcatccggtttacccaaaaaggagtgtttgaaatgagtatcgccgacaggtctccatattggcaattgttgttggttttgctcacttcgctgcttccgcccagtgccaaggtcttgccgctgaacactccggcatccgggtataggcggttgaatatggcaatgacatctttaccgcctcggaagtggcagtcttccagcgaggaggggctgaccggtatgaatttgctcttggcgtcagtggtgccggatgatttggcaaaccattcgacctcttccggccataatatgttgttttctccttccatcatcctcctgacatatccgctgatgtcttcgtaatggacaatcggaagccgctccttatattgttctgtggtgagaattgaactgaagtcgtatttttgtccatattctgtggctgcggcacgagacagtagttcctgcagacattcgcgctgcacttttagcgggttggctttgaagtaatcgatttgtgccaaacgcttttgggtgaacagtccgagtattgtgttgatgaaagccataattctgtgtgttctaaagtgaatatagattagtcgaattctaatttgtattgtttgttaatgaggttgaaactgctcctgtgatagtttgtgataccaaattgagcgattgcgttccggtggtcgcgggtgggatatcctttgtttttttgccagttgtagttgggatattcctgatgtattttttgcatgtattcgtcccggtgtgttttggcaagtatggacgcagctgctattgacatatatttcccgtcgcctttgacgatacagagatggggaatgtcgtggtattgtttgaaacggtttccgtcgatgatgatgtgttccgggcgcatgctgagagcgtccagtgctttgtgcatggcgaggattgaggcattgagaatattgatgcggtcgatttcgtgattgtctacttgggctacggcccatgccaaagcttcctgttcgatgatggggcgcagtttttcgcgttgtttttccgtaagttgtttggaatcatttaaaagctgattcgaaaagttgtccggtaaaatgaccgctgctgcaaatacgggacccgccagacatcctcgtcctgcttcgtcgcatccggcttcaatgcaattggttttatattttaactctaacatgtgaaatggttaaaagtaaaaggttacctttgcaaaggtaatcattttcgattttcaactttcaattttctgttaaattatgtggtctaaagaagaggcaaaagaattgagattaaatttttggaatggattcaagcgttattgctctcgtcatcatatctatcgtaaatgggtgttgaccggagtgaaaatcaaatcgactcagttgaagttttttgtagataatgaaaaggcattggttatgtttcagattgaccataagaatgatttgagacgctatgaggtgtatgagtgtttccaggcctatcgtaaattgatggcggcagattgtggtgaggatttgctgtgggaagaagattatgccggattgggggatcggttgatcagtgccatttatttcgagttgaagggtgtgaatatgtatagaaaggaagattgggagaggatttatgccttttttgccgagaaaatgcctttgctggaagaggcttattgggagtatcgggatttgatttctgcccgattgaaaagtgtggattgaaaaaggtttcatatttgtagataaaaatctttcgttttgaaataaaaatctttcgttttcttttgtttttctgtcggatagtttgtttctttgttgctctattagaaataatcttctgtatgttatgaaacaagatgaggtaacaaagtctttcgacgtaattattatcggtggtggtgcaaccggtgccggcacggctcgtgactgtgcacgacgggggctgaaaacactgttgttggaacggtttgatatatcgaccggtgctactgggcgtaatcatggtttgttgcatagcggggcgcgttatgcggtgacggatcatgagtctgccgaagaatgtattaaggagaatatgatcctccggaaaattgcaggacattgtgttgaggaaaccgacgggttgtttctgacattgccggaagatgatattcaatttcagtctaaatttgtagaagcttgtcagtctgccggtattcgggcagaagtgattgatcctaaagaggcgttgcgcctggagcctgcggcaaatcctgatattataggagctgtgagggttccggatggagctgttgatccttttcgtctgacctcttccaatattatggatgccaagagtcatggcgctgtggtatgcacttatcatgaggtgacggagttgttgaaggatggcaatcggattgtgggagtgaaggttttggatcataggacgaaagagactaaaaaatattatgccgaggtggttgtgaatgccggtggtatctggggacaccatattgcggagatggcaggtgtgcgggtgaatatgttgccggcaaagggtgcgctgttgatttttggacatcgggttaataatatggtattaaaccgttgtcgtaaaccggcggatgcggatatcttggtgcccggagatacgatttgtttgattggaactacttccagtaaagtgccttttgatgaggtggataatatgttggtgacagcaaaggaagtggatatattgttgagggaaggagaaaagctttctccgatattggcgcagacacgtattcttcgtgcttatgcgggagtgcgtccattggtggcatccgatgatgatcctagcgggcgtagtgtcagtcgtggtattgttttattggatcatgccgtgcgtgatggtttggaaggttttgtgacgattaccggagggaaattgatgacttaccgtttgatggcggaatggactacggatttggtttgtaagaaactgaatgtttctgccgcttgttctacagctgttgagaagctgcccggttctcgggaagatgcggaagaggttgggaagaagattatatccttgcctttggctcagcgtcgttcttctattgcccgacatggtgagttggctgaaaaactggctgaaaatacaccggtggagaatagtcttgtctgtgaatgtgaagaggtttctgtcggcgaggtgaagtatgcactgaatgaattggatgtgcataatttggtggatttgcgacgcaggacacgagtgggtatgggaacttgtcagggagagttgtgtgcttgccgtgcagcaggggtgatgagtgctgaaggtaagtattgtacacgacgagccaaagaggatttggcctctttcctgaatgagcgttggaagggtatggcacccattgcgtggggcgataccttgcgtgaaagtgaatataccgcttgggtatatgaaagtgtatgtggattgaaattacctcaaaaacaagaagaataatatgaaattcgatacagttataataggtggcggtttgtccggccttgtttgtggtatttatttggcgcagcaaggagagaaatgcgcaatcgtgtcggcagggcagagtgctttgcatttttcttccggctcttttgatttgttgaacacattgccggatgggactccggttgagcatccgttgagtgtgatggatgagttggaggtgcaagcgcctaagcatccctatgttaaattgggacgaggaaaagttgccgaattagccaatttggcggaagatttgctttgtaaagcaggtgtttctgtgaatggaaatgcggggaagaatcattttcgggtgactccgatgggtactatgaagccgacttggctgactttggatggatatgctaccagtgtagaagcagataaattaccttggaaaaaggtggctttatttaatattgcaggtttcctggatttttataccaattttattatggaggaattcaagaagttgggggttgagtgttctgtgcatctttttaatatggatgctttggagcatttgcggaagaatccgagtgaaatgcgttcggctaatattgcacgagtgttcgagaatcaggggaatctggcagaattaggccgtattttgaaggggagttgtaatggttcggaagtgattatgttgccggctgtgttggggttggacaagaccgatatgttgaaatatttgaaggatgtgacaggttgtgaagtgttggtgttgccaactttgccgccttcagtgcccggaattcatgcacaattgcaattgcgaaagtatttccaggagttgggtggagtatatatgttgggggataacgttatgcgtgcagatatagaggaaggtaaagtgattcgcttgtattcgtacaatcatggaaatattccttttgtggctgaaaatgttgtattggctacaggcagttattttagccaggggttaatagcaacagataatcaggtgtatgagccggtgtttggtttggatatcgaatatccggcagacagggagcagtggatggatttgaatttttttgccaaacaggcataccagtcatttggcgtgaagacagatgcttcgttccgggctgtgcgccaaggaaaagttttggagaatctatatgtggcaggagccgtacttgaaggatttaacgctttgaaagagggatgtggtgccggcgtgtcattgttgaccgctttggaggttggtaagcaaattataggtaaacgtttataagagtaagtcatgaatcttcaacaacataatatcagtgataataatttcgaacagtgtatcaaatgcactgtatgtacagtctattgtcctgttgcggcagcaaatcccttgtatccgggtcctaagcaggctggtccggatggtgagcgtctgcgtttgaaaagacctgatttttacgatgaggcattaaaatattgtatcaattgcaaacgctgtgaagtggcttgtccttcgaatgtacggattggtgatattattcaggctgcgcgtataaaatatagtaaaaagaagcctacgatgcgtgattttatgcttgccaataccgatttgatgggaacgatggctactccattggctcctgtggtaaactttgcattggggttgaagccgacaaaagcggtgttggatggcgtaatgaaaatagaccataggcggatgtttcctaaatatgctttcggaactttcgaagggtggtataagaaacaggcttccaaacaagcttcgtttgccaagcaggttgcttatttccatgggtgttatgtaaactataacaatcctcaattgggaaaagattttgtaaaggctatgaatgctgccggagtgggtgtacaattgctggaaaaggaaaaatgttgtggcgttgctttgatatccaatggatttatagataaagccaaaaagcaggggcaatcaaatataggcgcgattcgcaaggctgtggttgataagggaattcctgtgttggcaacgtcgtctacttgcacatttacactgcgcgatgagtatcctcatttgctggatataaataatgaagatgtccgtgaccggatagaattggctacccgttatctgtacagacttttgtccgaaggtaaagttaaattcaactttcggactgataagaaactgaaagtggcgtatcatactccttgccacatggagaagttgggatggtcttattattctattgagctgttgaagatgattcccggtgttgaggtgttggtgctggattctcagtgttgtggtatagcaggaacgtatggctttaaaaaagagaattatgaagtttcgcaacgaatcggtgaaggtctctttaaacagattgaggcttcgggtgcagattatgtggtgacagactgcgaaacttgtaagtggcaaatcgaaatgtcaaccactaagaagtgtgaacatcctatttctatttttgctcaaatgttagttgattaataattaattatttatggtacgcacaactttttttaaggttgtgcgtaaaaaacgtctttatttttttttgagaataaaactttttacatacttttgttttgaaatgaaagatatttattgtgtatcgaaaacagtttttctgaaaacgttttagtttcgaaagtaaatgtgtatttttagaaacattttaaattttattacttatgtggagtttcttgaaaccggcggcccaaaagcccctcttgcctgaaagcgaaattgctccgacgtataataaattgcgttggcaggtttttgtcggtatatttatcggttatgccggtttttatatcgtacgtaaaaacttttcaatggcgatacctgagcttgctcagtttggttttgaaaagggtgagttgagtattgtgttgtcaatgaatgcagttgcttatgcattgtccaaatttttgatgggtagtgtttcggatcgaagcaattcgagagtattccttccgttaggtttggttttggcgtcattggcaatgatgtttatggtggtgcctgtcgtagcatttggcccggaaaataaaacaatggccattgtgttgatgacagtgttgaatttcttggtaggttggtttaacggtatgggatggcctccgtgtggtcgtgtgatgacacactggttttctcagaatgaacgtggtaccatgatgtctatttggaactgtgcccataacgtaggtggagccttggtgggaccgatggctgtatatggcgccatgtggttcggttcttggttttatggtgcagattctacacactatttcttgattggtacttatgtattcccggctgctgtagccatgtttattgcagttttggcttatgtgctgattcgtgatactccgcagtcttgtggcttgccttctattgaaaaatatcggaatgattatccgaagaattattcggaaaaatcagaagaggtattgacaactcgcgagattttctttaaatatgtattgaacaacaagatgttgtggtatgtggctattgctaatgcatttgtttatatggtgcgttacggatgtctggactgggctcctacattcttgaaagaagctcaaggatatgacattaaacaggctggttgggcttatttcgcttacgagtttgcagcaatccccggaacattggtgtgcggctggttgagtgataaggtatttaaaggcggtcgtgctttgacaactattatttttatggctattgtagctgtattcatcgttatgtattggcagttctctgataattatattattgtgacattgtcgttgattgctatcggattctttatttatggtccggtaatgttgattggtgtgcaggctttggatttggctccgaaaaatgcagccggaacagcagccggtttgacaggattcttcggttatttctttggtacggcaatcctggcaaatattgttatcgggtatgttgctgaaatcgccggttgggactggacttttatcctattgctgatagcttgtgctctttcaatcttctttatggcgtttacctataaagatgaaaaatatctcttggaacagagaaaaaataagtaatgctaattttttaatttgaattttttataatccaaaattaagattatggttaataaattgttttatgcatcattggcttgcgggttattgttatctgcaacgtcttgtgaaaatcaaaagttcaacgacacgtatgtggatgttgatcgtgtgcatgtggacaccttgtctgctgaattgcaaaaagtaagagattacgtacctgagtatgctgtagttgctcaccgcggttcgactttctggactccggaagagactgaatctgcatatcgttgggctcgtgaggtgggtgcagattatctggaagccgacttgcaagtgtctaaggacggtgtgattttggctttgcatgactccgatttgaagcgtacaaccaatattgaaaatgtattcggagaaacatgtccggttgaaatcagaaaacaatattatcttgatttaggctattctgaaaaagaagctaatgaaaaagtggctgccgatgtcaaggcttttgttccgaactatccgtgttcttatacctaccaggagttgatgatgttggatgccggaaaatggtttaacgagacttctatcgagcaggctcaaccgggtttcgtttctcagcgtcaatatatttctacattggaagacttgattatgttctccaaaggatataaattgaagagagatggcaatggagacagggtgttggctcagaaaaacggtaaatattttgaaaaaacaggcgctactatcaataatccgttggcctatacaacagaggatgtagtaaagtataactttgaatatgaagaggatggagagtggggcggtaatattccgggaatttatatcgaatttaaagaaacctggttgaatccttccggtttcgagcagatggtatatgatgaattggcagctgttcaggatatgaacattatggagaaaaaagctgctagcgacaaatggtacatcacaaaggcagaatccggcaaccgtgctaaaaacggtcgtatgggagacaaattggtgaatgtgggtgaaactaacggtaaggtgattttgcagacattctctttgcagagcctggtgaaagtaggacaagttttcaaaggtgaaattcctatgtgtttcttgttgtggaaaggtacaggcgctactgacctgacttatgacgatccgttgggatatgcatcatttatcaatctggcagtgcagaacaaagctcactacatgggaccgtgtatcgctggtgctcccaataactatcctgagttgaaccagccttggcagcatgatttgattcatcgtgcaaaaatgaagaaccatccgtattcttttgacacatatgatcagatggctaagtatttcggtgtttacaatcatggcaacgaaggaggaactcgttatcaggctccttatttggatgcgttctttaccaaccacactgatatgagtttgaaatttatgattgaaaaccaggataacttaggtaaggtgaatccggaattgaaagaagtaatttcaaagagacctcaggttgtgcctgatcctcttaaagtattggaagaactgggatatacagagtaaagttaatcgtctaatttgtatttgagtatatgaaaaagtatatattattgcctgcaatgctggttgcttcagtatttgcatcatcaacagtaaaagctcaagaggatgtcaatcctttgttgaagtatatcaataaggataatggtttcgaagccagtgtaggaggacgtatgtttgccgatgtggcctattatcattcagagtggacaccgatgaattccggtgctgctatcacagatgctcgtgttcatgcggcattgaaatacggtcagtggtatctctatgcagatttcggatttggattcggtgagttcagccagaagaacttgtttgtaagatacaattttaaagaaagcgctaaaggtattcacagtgtaaaagccggttattataatgagccgtcttctatgagtatgatgactagctcttataactatcacttcattacccgcccgacaactgcacaggcattggctccgggacgttctttaggtgctacttataagttcttcaaccagcatttctttgctgatcaaggtgttttcgctcaattgaaatacaatgaccagaaggaaggttaccagggattgagtttaagcggtcgttggttgtggaaaccggttaatgacaaacatgttactttccagttcggaacaggtgcgcgttatcagcgtattaatggtggagaggtagtgcaggaaggtgtttataaaacgaatatgcatgtagctgctaatatgcaaacctatgttgacagaacaactgaattcttaagttgtgatctgccatgggctaagaatgctttcactatcagtcctgagttcttgttgaaaacagaccgtttcttcggacgcggagagtttatctggaagaaagtatggaaagatcgtcctgatcaggtgttgtttgagagccaattgggtggacagcagagttggactgacctcaaaggttggaaaggcggaaacttgttgcgtacgacaacattgaacggtgcttatgttgaattaggttacttgatttgcggtaaagcttattcttatgacgacgaatatggtttgctgaagggtatgggtgacaagaattctttggaagtggtagcccgttattcttataccaatttgacagatattaccaaaggtgacgtattcttgattggtaatcacaaattctatccaaacggtgaaattaaagattatccttattcttcaagtattgatggaggaactatgcatgctgtaactttaggtttgaactattcatttaatcagtatatcaaattgatggctgagtatcagtattcaaacttgagcaatgtttatttcccgaatgatcagaacttcaatcaattgcagttgcgtgtagcatttgcattctaatcgttggaaatgttatcctaactttaggaggtgtgccttgtcgacacaccttcatatataataaagaataaggcgaccgaattttcgatcgccttattctttggttaccttgaatcttatttaatttcgatagttctttctgctttcttgacctcttcttgggataattttggtaaatcaatggttagaacgccatgttcaaccccagcagagattttttctttatcaacatcatccggtaagatcatagtttgttggaatttagagtatgaaaattcccgacgtaaatagcgatgttccttttgttcctcttccttttcactctttttttccatggaaatcactaaattgttgtcttcgtctatgcgaacgttgaaatcttctttcgtcatacccggcgcagcaacttctactttgtattccttttcggattcaatcacgttaatcgcaggtgcggtagcgtttgcttttgtcatccactcgttatcaaagaaatcattaaagatacttggtaaccaattttgagttcttcttacaggcatcataatttaagtctcctatctttaagttcaacattatcatttaattgtattcaggctctttgtgaacctgcattcgattatatttattgcaaagcatgtgccaatggaatttgaggactttctgacaccaattttatgtcaaattttcagtgttcctgtcaatcaatgacaagaataaggtaagcttagatattcgaatttctaataataattgtagctttatactcaattttagtaggggaatagaataactattttataaatatacatcaatataaaaaagaactactattgggctaaagcaacacttgttatggggtgtatgcttggattggggtggttggcaaccccgataatggcacgagatatgaacgtgcggctaatggatgaagatacgacaattatggaagttgtcgaggtataaccggaatttgacggaaatttaaatcaatggatctgggaaaaatttttggcattaattttattaaacaaagatattgcgttgtatttttatcatctttagaaaagttatttttttcccttacttttgtcaaagacaattgtgtttaatatggatatttcggcatttttggatggtgtaaataaaaagagcgagagagcttggaaagagctttaccgatattattatgccccgttgtgtagttatgccgatcgcttgactggagaggagggattgggagaagatattgtgcaggattgtttgattcggatgtggaagatacatcttgaatttgtagctttaaaagctcttacctcatggttgtataaaagcgtgtataatgcttcaatcagtgtccttagagaaaaaaaatcgaaagagcgtctatatagcgaattgcctcaagagggaatggttagtgaagctgatgcacagaaattggctttgagagaagaggttattcgtcgattttatgaggtcttatacaagcttccccgtcagcaacaagatgttttattatttagtttaagaggattgtcggtatcagatgtagcaaaagagatgaatgttagcgagaataccgtgaaaaccttaaagaaaagagcttatctatttgtgcgagagtacttgggacctcagtgtatgcaggttttattattatttttatcagggaaataatacgatttgttgtgtcggaaatgttaattttttaattttcttttcaaaaatgtcacccgttttttgtttgcttgcgtttgtatgcaaacaaaatttagtaaagcaatgaaatgggatgatatagaacaaaaagctgacgaaacagtagtgcgtgtggtccgagaggtattgggagagaagtttggtacagcagattcggatgtggagcatatcgctcgggagttgctcatgaatgatacgttagaaaaggagcatgataggtgcggaaaatatgactaccaaaaagcctttaagtacatatctcgagggcgttcaagaaaaatcggttggagtatttgggctgttgcttgtatgatatgtattgctgttggaactgtttttatgttggaaaaacctcaagataatgaaggtgtggttgtgttggctaaagaggaaggagccggcaatcaggttatgttatacttgggcaatggaaaaatagtggcgttggatgatactaaccggttgcatcttcaggaaaatggacagcaaatagaagtggctaatggtaaagtcacttatggtgacaacgttagaaatgaaagtaagaacgttgtgtataatgtcttgtctgtacctcaatgtgcagaatatcatgtggtgttggctgatggaactaaagtttggcttaatgcagattcggaattgaaataccctgtttcgttttccggagaaacaaggcaagtgtttgttagaggagaagcttattttgaggttgctaaagattctttacatccatttattgtgaggaatggcaaggttgatattagagtgttaggtactagttttaatatccgggcatatcaagattcttctatttatacgactctgttgtctggctgtgttgagatttgtcacgccgatgatcatttgtttttaaaacccggtcagcagtgcgaagtgagtgaaacaactggtaaaatgacaatcagcgagcctgatttagatgtggtattggcctggaaaaatggcgattttatttttaagaatgctccgttgactacaattatggaggaaattcagcgatattatggtgttagagtggaatatactcaagagagcttgaaagacagaaaattctacctttatatagaacgtagtaaacggttggaagaagtgttgcagaagttaacttggactggtagtgtgaaatatcgattggaggggagaaaggtggttttgtatgaataattattgcgtatagattgattttgcgcaaatgtaatataacaaacttttaatattaaattatgaaaagaagacgaggaaaatgtccagactggcaaatcggttggaaggtttgcaaacgattgtttttgttggtgatgagtgctttcgtattgagtccgctaagtggacaggcaaacaaccaaagtgttactttaaatgtaaaaaaggcttctttggtaagtgttattgaagatattcgtcgtcagacaaattatgagtttatttttaatgccaaagatgtacaatcattggaaggggtaaccttagatgtcaaagatctgagtttgcagggagccctggatatcattttaaaagataccgggctggagtatattgtcaaccagcagactgtggttatcaaaaagagtatggttgctgcccaacaggttgaatctctgcatttgaaaggttatgtgacggataaccggaaaaatccgctacctggagttactgtaaaattggcgaatgtgatgttaggaacatcaacaaaccatttgggatatttttctcttcaggtgcctgtaaaatccggggctcttgaattttcttttgtcggttttgagacaaaaaaggttgattttacacatttgacaacagatacattgcatattgtattggaagagatgatagcagaaatggaagaggtggtggtgaccggttatcagaaagtggataaacgtcgttcaaccagtgccattacatctgtaaaggcttcggatgtgttgattccgggaatgacgagtatcgatcaggcattggaaggacgtataccagaattgatgttgatggctaattcaggtgaggtcggtgcaactccccgtattcgtgtccgtggtacttctacattgcttggtaatcgggaaccgttgtgggtgttggatggttttatcatgcatgatccggtaaatgtcagcgtggaagatttgaataatccggactatatcaatatcatcggtaacgctattgcaggtattaatccgcaggatattgaacgtgtcgatgtgttgaaggatgcttctgctactgcactttatggaacgaaagcggctaatggggtgattgttgttacgacaaagcgcggagcagtcggacctgctagattctcttataaccattcttccaaatttacaagaagaccgcgttatactgataaaaacattaatttgatgaactcccgtgaacgagtgcagttcggtaaggaattgagcgatttgcattatcaatttccagacaacatgccactggtcggttatgaaggtgctttatatcgctattataccggagtaacagattataagcaattccagcaggaggtgttgagatatgagaccgtgaatactgattggtttgatcttctgactcaggacgcttattcgcatgatcatacatttggtgtgtcaggaggttccaatacaatgcgttattacgtttctttgggtgcaaattttgaagacggtgtttctaaaaccacagatacaaggcgttatacaactatggtaaatatggatattaccttttctgaaagaatgcgtgcaaatttttctttaagcggcaatatacaaaataagaataatttgatgcctaaaattgatgcgatggattatgcctataatacttctcgggctatcccctgctataatgaagacggttcgttgtttttttatgatgcgatcgggtataacgggatgaatgtatacaacaacaagttcagatataatattttgaatgaaattcagaatagttcgaatgaatacagaggtagttctttgaatgccaatcttactttgcggtataatataattgatgatttggaggtacttgtcgctggcagttatatgcatagcagtacaatgcaggaacaatggtggggagaaaagagtcattatgttgcacgtttgagaaatgcagagtatggtgaagtcggaaaaacaggtgatagcgggaattgtattttgccttatggcggtattttaaatacaaataattcagagcaggattcatatacattccgtacccaattggagtattcgaaattgtttggtgaagaccaacagcacttggcttctgttatggcgggttttgaattgaatggaactacttctcgaaatgttgctgatgaaacacggggttttgtaaaagagagaggactgcaatttgtagataaggttgatttggaaaaatatccgtattatcagacttggcttaatgaaaatcatagaacaatagggcatggtattacgaaagaaatttcaggttacttgactttgacttatagttattatgattatttttcattgaatgtaaacgggcgttttgatgcttctaataaattcggtagccggagtaacgagaagtttttgcctatttggtcagcatcaggaatgtggaatttgaaagagacttttatgaaaaatgttgatgctgtttcaaatatcagattgagagcttcttatggaatacaagggaatatgttggaggatcaaagtccgaatttgatattgaaacaaggaactatcaatccgatgtttaatgaaaatgtatcaactgtagcccgttatccgaatcctaacctgaaatgggaggagacacgtcagacgaatcttgagctggagctttcattttttgagaatagattgggattgacaggaactttgtattggaaaaagacaagcgattgtttcacaacagtgcaagtgtcttctgtcaatggcgtacctggacactcctatgtaatgaatggaggcgatttggagaataacggttattcggttgtattgagcggtacccctatccggactaaagactggaactggaatttatatgcttatttttccggtaacttgaatacggtacgttcttccactgttgagaaatataacattgattcgtatttgaacggtactgctttggtggatggggaagctatcagcagtttctattcttaccgttttttgggattaagtccgattaatggagtaccgatgttcaatgattattctgacagaaggcatttgttggaacataaaagtctggaagatattgtgatgatgacaatggagaaaagcggacagcgggatccgaaattttcaggtagtttgtctacttttgtttcttggaagagtctgtctttatcaatgaattttacttatagcttgggttctaaagtgcgtttgttcagtttgtatgagccaatccttagcggggtaagcgcagagaagaatgtaagacatgaatttgttaatcgttggatggctccaggagatgaaaaatatacagatgtacctgtgattatgagtccttcggatcctgattatcttggatatcggaatcatttttcttcgcttccttctgatgttacacatattgagcaatttgcaaatagtgtgtgggatatgtatgataaatcggatattcgggtagtcagtggtaattatctgaaatgttcttcattttctcttcgttatacattcaatccggattggttgaaaaaaacgcctttttcaaatgtgcaagtaagtttgaactctatgaatttgtttacctggtcggcaaaagccttaaaaggtcaggacccttcacaggctggttttgctaaaccgaatctttcattgagaccttcgtatacatttcagttgaatgttactttttaaaatagacggtatgaaaaatatattgataagttttttgataatgatgatgtcaggttgtaattacctggaagattattcacaagatcttgtcttggtaagttctgtatctgatttggatgaggttttgttaggtgatgtgtatattccttcgaaggttgaagtgaaggatatggcttatggagatgcgggatggtggctacatattttggatgatgatgttaatggggtgatatcttctaaagcaattaacagggattggaatcatgcgatgaattccagttatttcggttatacgacgtggcaaatggaagtgggacgtaattatgatggtaatagccttgctgctgataatgctttgtgggatgatttctataaaagaataaatcttaccaatatcatattggatgaaatcgaagatttgaaccctgttaccaaagaggagaaattggctggtttaaggataaggggagaggctcattttttgagggcacaattttattttgttttggttaatatttatgcaaatgcttataatccagagaatgcaaaaacgacattgggtgtgccgataaagttgacaagttatgtagaacatgacaaggacaaggaaacacaatttgaacgtgcttctgtcgctacagtttatgaacagattctgaaggatttgaaggcttctgtggattattttacccaaagcccgcaaactcattcattttatcgggcatccaaagaagcagctttgctgttgttaagtagagtttatctttatatgcaggaatgggaaagtgcacgaacgacagctgaagagttgctggagttgaagtccgttttgaagaattatgctttgttggatgattccagtgaagtgatttccaaaacgaatcctgaggtgttgttttctcaaggttcgttaaatttgcaacaagcttttactggtgatggaggtgacttctgtatttctaaagatctgtataatttatatgattccagtgattatcgtaagactgcttattttggtcatagccaaaatagtgatagtatatccttaggacataaatataaaaaaggcttgcatcagtcttatgtatcagatttgtatctgttgagaacatctgaggcgtatttaaatatggctgaggcatgtgctatgcttgaccagaacaaggaggcttcgaattggctgaaccgtttcagacagaatagaatagaaggttggcaagatgtgatttatgatcagacggcaattattgatgaggtaaggaacgaacgtaggaaggaattgtgttttgaaggacatcgttggtttgatttgcgcagatatgcagtgtgtcaaaaggcgccttttgacaaagaaatcgagcgtgtttttgccttgtatgattataataatcaatttgaatttttgtcagctcgggtttataggttggaaaagaatgatcctgcctatacattttcaattcctaaatctgtactggagtttgataaaggtatgtcagataatgtaagacccgtaagaaaatcgatacgtacaattttgataaattttgattgatatgagaaacattttttatatattgctttgtgttgtattgtttgcttgtggtaaggaagattcgttagattcgcagatatgtctggatgatttgtatgcaattcaggatgtgccggaagatccggtgaagcatgaaatttataatatttacaaagagtatggcgtgcctgtctattttaacgatacgataggaaaaattttattgaaatacgataaggatggaaatcctgtttatcaaatagagaagttggatttggcatggaagtatagttcttatgaaaagatgaattatacttatagttatattactgataagaaaaggcaaatggaggttcttggttggataagggaatatttgaacaatgccgacaaggcattatatcctttctgtttttttatcccggattctatatttcgtgagaatttggacaatgatgaggttattatattggaagatttatatttattaggattccgttcgttgaccatgattggcggtaattggaaaagtggaaatgaacagaaaaatttagtaaatatgaagcgtagtatggttgttcagaaaatcaataatttttccaatgatttgattgattttaaaaaagttacagatgacaatagttatggacataaatattggaatgaagtttctgatttaattcctaagtattataaatgtgatgtgttggatcctgaatatgcaggtagatggactggagaagcattgagagcaaagcaagttgaggcaagagggtatataggacctttgggatttgtgatgggggcagaaatggggaatggattatttactccttgggataaagatgaagatataaaatgttatgtaaaggttatgttggcgactccagatacgacttttcgtaaacaatggggaatctatcctttggtaatggaaaaatatgaggtgttatatcagataattacagaaaaattgggagttgaattgtaaatgggaattttatgaaaaaagttatatttatattactgagtattgttatttggtgtgcttgcgaagatgaaacagagccgattgttggtttggaaggggtggcatctgagtttgtggatgagcgggatggaaaagtgtacaaatgtgttgctatcggagatcaaatctggatggcagagaatcttgcttatcgtttgccacaaggaggacttgatggatgttatacttatcgggaggatgtggtggatacaaataaggttcaacctcagcaggaggatttttatgcggaagtaacagaagctattgaagatggtagaatcagtaaagaaccgttacctgaaattgtatttgcgccaacaagtccggctgatgtattgaaatggttttgggatcagcctgtgggtgattttatggcgcaagttcatgattatgtatcatattatccgtctttggcagcaacagaacttgttttgaaagatcttatttcgggaatgaagggcgatgctattattgcagcagccaaggaagccttggcaaaggcagaaaatgtaaatggcggttatacctctgggaacggcttgttgtatacctatgaaggagcgcagaaggcttgtcctgaaggatggcgtttgccgactgatgaggattggaaaaaacttgaaagattattgggtatggatgagcatgagcttgatcttttggaagaatggagaggaaaggaagcagggatattattgcatgatgtaaaaacagcttttggggttgtttattcaggtgcccgtgtttatggaaggtttaattttgattctccttatatgaataagggaatgaatgcttattattggtcatcttcacagattgtacaaaatgattctacagcagtggcaattatacgtattgtatctcgggtgaatgacggaattttgagaggaacgtccaatatgacggcggcgtatagcattcgttgcattaaggaataatataattttaatatttgaatatatttgtatgaagaagattttttttatgtttggagtattattgggcttgttatatacagtgaaggctcaaagtatctatggggataaggtgagggctgacgtaaagatgaaatatgtttattcttttgaagaggcattaaaaaaagcacgggaggtgaataaaccgatttttgttaattggtttgcggattgggccatcccttgccatggaatgaatcagcacgttttcagcaatgaggaatttgctaaatggatggatgagcattatgtgaatttattgattgatattacatcgcgagaaggacgtccttgggcagtgaagtataatgcactgacgatggctcaatatgcagtattgaatcaagatggggaactgatttttagaattcttggtggaagtcctttgcctgaatttcaggaaattttgaaattgtcacttgaacccaagacaacgcttccggtaatggaggcatgttatgaaaaaggagaacgaaacttgaaatttttacgaaagtatgctgatgttttaaaaattgcaggtttgcatgataagaaaaatcaagtaattgatgagattttcaagaagctgaaaaataaagatttgtctaaaaaggaaaattgggattatttggtgcagaaaatagatggagataaagatgaactgtttcaaaagttggtaactgataaggatgaatttgtgaaaaatattggtgttgaaacagtgaatcagtttatggcaggaatatatatgtcaaaattgtggccctatgtttgtggcaaggcgatttatgatgccaatattatgacagatattgcgatgggattacataaatgtgatttgccggatacattgggtgtatttgctttgtatgatatggcaaaattcaggggagagaaaaaatatgataaaatgataaaaacaatgcgtaatagtgttttgaaatttccttcggattggatgggaactttggatatagctctaggggatctaaaaggactggcaaattctgatcgtgatttgttgattgggtatctgcaagatcgttccaaaggaatgaagcgtcctcgattaacttattatgaacaggcgataaaaaaattagagaataaagaaggaattcagtttgaagatttaagtttcgaggtcgctttggcaaaagcgaaaaaagaagggaaaaaattgtttatggattgttatacagtatggtgcggaccttgtaaaatgatgaatgaacaggtttttactgtaaaacaaactggagattattttaaaaaacattttatagctttgaaagtggatatggaaaaaggtgaaggtcctgagttgctaaagagatttaaagttgaggctttccctacgatgtttgtatttgacggcgatggtaaagtcttgttgaaattacgtggagcacgaaatactgaaacattcttgaaggaattgaaagaggtgtgtggagaataaatcttgagattttatattgtaacgccgatggaaatattgttttctgtcggcgtttgttagattattgtgaaatattctttttgcctaatgggtatcattgggttattttattatttttgtgcatgataactaattttttaagcgtatgaaaatagagtgtttcaagggtgatgaagagaaactttatcaaaaggttgcccatctggttatggatcctaaggtgttgaaggaaaataataactatccttttaaaacttctgaaaattacagatggtttgtcgcttctgtcaaaagaaaagtggtaggttttatgccggtagaatataaaaatggatacatggttcttaataattatgtgtgtggaaaagaagagcaggtcttggatgccttgattaagaccgtcatacaaaaatatgaagaagaggagatggaaatggatatgttggcagtggtgcagcgttgcgatatggatgttttccaaaggaatgattttggaattgtcaaagaatggaaactgtatgtaaagatggaatggaagggacaatagtagaaaaattgaatgtgtatgagcaagcccagttgcggctagctaaggtctttagttcttttgataatgtttatgtttctttttcaggaggaaaagacagcagtgtattgctgtttttgtgtttagactttatccgtaaatattatccggggcgtaagttaggggtgtttcacatggattatgaggtgcagtatacggaaactattaattatgtgaatcaagtattggcttctaatagtgatgtattggaggtgtatcgggtttgtgtgccttttaaggtgtcaacatgtacttctatgtatcagcgtttttggcgtccttgggatgatgatttacaggagtgttgggtgcgtgatatgccgaaagactgttacacttatcggaatttttccttttttaaccgtcgaatgtgggattatgattttcaacgagtattcgctaagtggttgcatcaacagaaaaatgccaaacggacttgttgtttggtaggtattcgtactcaagaaagtttaaatcgttggagaactttgcattataatcattcctttcgttacagaggtttaaagtggacttgtagaataactaaaggagtttataatgcttatcctatatttgattggctgactgctgatgtttgggtggcgaacggaaagttccgttggccttacaatcatttgtatgatctttattatcaggcaggtgttcctttggaaaaacaacgtgtcgcaagtccttttatctctgaagccagaaatagcctgaaactttatcgggcaattgacccggatatgtgggggaagatgattaatcgggtgaatggtgtgaattttactgctttgtatgcaaatacatccgcagtcggcagtagaaaacaagttatcttgcctcagggatatacttgggaaacctatatgaaatttttgttggatactttgccggaaaaaactagaaagaactatcaaaataagctggctgtcagtatgcagttttggagggaaaaaggagggtgcctttcggatgaaaccattgaaaaattgagagcagccggcattcctattttagtgggaggaaaaagcaattacaagactatcaaaaaacctgtccgtatggaatatatggatgatatcgatttgcctgaatttaaggaattgccgactttcaaacggatttgtatgtgtatactgaagaatgatcacacctgtaaatatatgggattcgctcctacaaaagaggaaaaagaacgaagagaaaaagcgatgcaaaaatataaattgtgaaatatgaacgaatataaaagtccggtttataatataatagccgtaccggtagaaaaagtggtagctaatgattataatcctaatattgtagccccacctgagatgaaattattggagctttcaatttgggaagatggatataccatgccttgtgtgtgttattacagaccggaaaaagatgagtatgaacttgttgatggttaccatcgatatttggtgttgaaaacttcaagaagaatttatgaacgagaaaaggggatgttgccggttgcggttatagaaaaagatatgtctaatcgtatggcttccactattcgtcataatcgtgcacgtggaacgcatagtgtggaattgatgagtcatattgtttcggagttgacgaaagcaggtatgtcggatcagtggatattgcgcaacatcggaatggataaagatgaactgctgcgtttaaaacagatttccggtttggcagagttgtttgcagataaagatttcagtttgtctgatgaagaatagggaatggttggcgatatgatacgttagtgatgattttgttgtatctttgacctgtaatataatcttatatctaatgacaaataatactacaacttctgtggcaaaagtattgcctgtcctcttcagcttttttgtgatggggttttgtgatgtggttggaatatcaactacatatgtgaaaattgattttaacctgagtgaaacggttgccggttttattccttctatggtgtttttctggtttttactgttatcagttccggtagcattgggaatgaatcgaattggacgtaaacgtaccgtgcaaatcagtaacttggtaactattatcggtatgttgatccctttcttttcttacagtttggtgacttgtatggtggcatttgcgttattgggaataggtaatactattctgcaagtatcactgaatcctttgttgacaaatgttgtgtcgggtaattctttgacaagttcgcttactgcaggtcaggtaatcaaggcggtttcgtcttttatggggccgattattgccgtgttggccgtgaatgtttgtggaaattggcagtatcttttcccgatttttgcagtcattactctgctctcttcgctttggttgatgatggttgctattccgaaagaagaaattgcagtggaaaaaggtagttcaatgaaggctacgtttgctttgttgggtgacaaatctattttattgttgtttgtcggtattctttgtgctgttggtttggatgttggtatgaatactttaactccgaaattgttgatggaacgttgcaatatgatagaaacagatgctagtcttggtgcaagtgtttatttcttttgccgtacagtcggggcgtttattggagcttttctgttggccagactttctgatgtgaagtatttgagagtgaatttgttgattatgctggcatctttaggcgcactttattctgctcattcttctatgttgatattaatcggagtcggagtatttgcatttactttgtcatgcgtgttctcaatcgtctattctttggctttacgctgccgtcctgataaagctaatgaaatttctggtttgatgattacaggtatttttggtggtgcaatcattcctcctttgatgggatttttgactgaaaaaatggattcgcagataggttcattgcttgtattggcagtatgtgccatttatttgattttctgttcttatagttttaaagcacaaaaataatagccttatgtatagatatgataatcgtatagttattacattagatgctgggggaactaatctggtatttggcgctatgcaggccaataaatttattgtagaaccgattactttgccatcgcatgcagatgatttggaccactgtctttcaacaatggtaaaggggtttcaaatgattattgatcagctgaaagaaaaaccggttgctattagttttgcttttcctggcccagcagattatcctcatggtattattggcggatatttgcctaattttccatctttccgcgatggcgttgcactgggaccttttttggagcatacttttggaatccccgtttttatcaataatgacggtgatttgtttgcttatggcgaagctttgggtggagctcttccagatgtgaatgccaaattggaagcttatggaagttctaagcgttataagaatttaattggttatacttttggaacaggttttggaataggtgttgtggtggataatagtttgaatcggggtgataattcatgcgtagaaactttctgtcttccacataaaaaaatgcctgacattatagtggaggatggagtagctatccgtgctgttaaacgagtttatgcagaagaatcaggagagttaaaccatcaatttgagcctaaagatttatttgaaattgcagaaggtagacttccgggtaatgtcgaagctgctaaacgtgcttttgctgaatttggagaaatagccggtgacgcaatggcaacagctgtgactttgacagatggattggttgttattggtggtggtattactgctgcacacaagtatattatgcccagtctattgaaggaaatgcgagttaaaattcatactttgcaaggagatgaactgaatcgtgtgcagatgaaggtgtatgatttggatgatgaggaggaatttaaagcttttgctaagggtgagcaacgtgctttgaaggtttatggtacagaacattttgtgacatatgatccgcaaaaaagagttggagtgatgatatcaaaattaggtgccaatcaggcaatctctgttggtgcttatgcgtttgctttgaggcagttggatgttcaagaaaatagtaagtaaatgagtatgtatccgttgaaatttaaacctatattaaagtctacaatttggggaggagagagaattattccgtataaacagcttgttgatacgcagaagcaagtgggggagagttgggaactatctggtgtgaaaggaaatgaatctgtcattgttaatggtaaatatgctggattgactcttccggatttgattgctcaagagggggcgaatttattgggtgtgaagaattatgaacgttttggtcaggaattccctttgttgataaagtttatcgatgcccggcaggatttgtctattcaagtgcatcccaatgataaattggcttgggaacgccaccaatctaagggtaaaactgaaatgtggtatgttgtgtctgcagatgagggggctcacttgcgttcaggatttgcaaagcaggtgactccggcagagtatgaagcgagtgtgaacgatgatacgattactgatttgctgacagattatcttattcagcctggtgatgtgttctttttgccggcaggccgtgtgcatagtataggcgctggagcatttatagcagagattcagcaaacgtcggatataacttatcggatttatgactttaaacgtcgggatgcaaatgggaatactcgggaattgcatactgaacttgcaaaagaagctatagattatactgtagaatccgattatcgcactcattatattgctagagagaatcaagaggttgagttggtaagttgtccttattttacgacatctctttatgaattgactcaagagtttacattggattattctgcactggattcttttgttgtactgatatgtatgtctggtcaggcaacatttatgactgatagtggagatgaggttgtaatgcatcaaggtgaaacggtattattgccggctacagcccaatggctgcgtatccgtccggtaggtaagtgtaacttgttaactagttgtgtaaaataaagagattgcatttaggtgtttgtaagattgtaaattttaatttatattagcagtagtattaaatatatatatatatgaagaaagtcaattttattttattggtagcactgggctttttattgggcgggtgtgctaaggaaccgaatcaggccgtgaatataattccgcaaccacaacagttagaagttgttgatggcggtttttctttaactccgaaaactgtaatcaatgtagtaaagggtgcagatgatttgcagccggcgtgtacttttttgagcaagttggttgaaaaatcgttaggtagtgcattggaaatcaaaagtggtgaagtaaaaaaggatgcagtgaacatcatcgttgattcctctatgaaaacagatgcctatgaattgatcgtaacagataagtctgttgatgttaagggcggaagttcaaaagcggttttttatgctcttcaaagcttgcgacagatgatgcctgtaggaattgaaaaaggtgagcaaatgagtaagattcgtattcagaatgtgaaaattcaagatgaaccgcgctttgcttatagaggaggtatgttggatgtatgtcggcatttttttacagtagaagaggtgaaaaattatattgatattcttgctttgcataaattgagtgtttttcactggcatttgacagaagaccaaggatggcgtattgagataaaaaaatatccggaattgacacaggttggtagtgtgcgtaaacaaaccgttattgggaagaatacggggaagtatgacgggaaaccatatggcccttatttctttactcaagatcagattaaagaaattattcaatatgcagccgataggtatattacaattattcctgaaatagaattgccgggacatgcattggcagctttggcaacatatccagaattgggatgtactggtggaccttatgaagtgtgtcaaatgtggggtgttttcccgcaggtattttgtgccggtaatgaaaagacattcgagtttttggaaaatgtattgacggaagttgcagagctattcccttctgatattattcatattggaggagatgaatgtccgaaagacgcttggaagaaatgtaaaaagtgccagaagcgcattaagaaagaaaatttgaaaaacgaagaggagttacaaagttatgtaattcatcgtattgaagcatttttgaagacaaaaggtaaaaaaatcattggttgggatgaaattttagagggaggggtatctccgacagcaaccgtgatgtcttggagaggtaaaaatggtggcattacggctgcgcagaaaggtaataatgttgtaatgactccgaatgattatgtctattttgactattatcaatcaaaagacatcaaaaatgagccatttagtattggtggttttgttgatgtagctaaagtatatagtttggatccaacagaaggcttaacgccagaacaaggggaaaaggtaataggcgtgcaggctaacctttggactgaatatatttcaacttttagtcatgctgaatatatgttgttacctagattggctgcattgtcagaagtgggatggactgctttagataaaaaagattatactaatttcttggaacgggcaagattactgactcagcgttatgaagcattgggatataattatgcaaaacatattatgcaggattctatagtagaaactaataaaactgcgaattaataagcatagcgataatttatatatcacttatccgtataaatggtgcatttatgaaaaggtatatttttagctttattattagcatgtatatcgggtgtgggcttttagtagcccaacccgtttcatcattattccaacctcttagttgggaacaggcgagtatgctggctgctagagaaaataaattggtgatggtacaggttggtaatgtaggtaaagaagttaatcaacggataagaaaggatgaggaattgctaaattatcttttgcgaaatgtgatagcaattcatgttgatatggaaacaccgcaggggcgagcgtttgaacctcggttaatgctatattcatatcctgcgtatgcattttttatgccttatggtgacttggttggaattgttgcactaggcgaagtgaaggtacatccagagcgattgctggaagtattagatgaagcaaaggaattggctagagtaaaaaaaaggaatagccgatctttgaaatttgttgatataaacctagaaggagcaaaagcatgggctgcgaaagaaggtaagaatatttttatcaatattgcaaacgatacggtacaggcatctttattgatggataaaaatgtattcacactaaatccaatagctgattattataatcagcattttatcaatttgcgtatggatgcttcttttgcattggagttaatgcaaaaatattgtattaaagagattcctgcgtatctttatttgaataaagatggaaaattactttttcatgaagaaggtatttgctcatctgaagttttcttgaaatatggagaggaagcattaaaaaaatctcaaggtatttctttgcaggatttaagtgacgtagagatgttggaacaagcaaagaatgagggtaaatttatttttatcgattattatgtagaagggagagttcatcaagaattagtgaaaaaagtgtttacagatccagaggtcgttgatttttttgccgggcattttattaatgtttctcgagtaaatgataacgcatgtctggtttttgcagatggtaatgggcgagagttgcatagggttttagaagtgaaagatgctgcagatttattgaacgaagcgagaaaagtgatatctggtagggggttagcaggattgtcggctcgttatagccagggggattgttctgcaactactttagaagaatatattgtagcattagctcgtgctggttatattcaggcagcttcacagatgacaatgcaatatttgaatacaatggaccctgcttgtttggaagaaaaaagatattgggattttttttataaatatggggtaaatgtagagccatcattttttgattacgtgttatccaatcgggataaattgacaggattatatgggaaagaaactgttcaaaataagatttctgaattatggattgctggtgcagaaggttttgtaaaggataatcagtttgatgaggagggatttaagctatatatcaagcgattgaaaaaagaaaaagtagaagggtggcaatcaattgtccgtaatgctcgaatgaatgctgcagagaaattgggagattggaagacctatattaatttggcagaagagaagtggaatgaagaaaaaataggtgattcagaactttatagttgggccttaaaaattaaaaatcattgcatggatggtaatatccgttataaaatggctcaatggttggctcaaagggtaatcgatatcgacaagaaggaaaaactcactggtaaaatcgatttgacttcttatcgtggattctttgaacaactctcaaatgatctattgaaagagtagtacaatcttattattttaatcttttttcgagtatatacatctcatctcgaagacgggcggcttccaaaaagtctaactcttttgcggctttttgcatggcagcttttgtcttttttagcattttctcaatttcaggcttgctcatatagtctataacaggatctgcaacgatttgttggtgctcctcttctatatagaatttgtttgtattctgagttaagactgtatctgtgttttttttgatttgctgggggatgatatgatgctcttcattatattttaattgtttttctcgtctatagtttgttgcatcaatagtttcttgcatagaacgagttatttggtctgcatacattataactttgccgttgacattacgtgctgctcgtccggctgtctgtgttagtgagcgtgttgaacgtaagaaaccttctttatctgcatctagaattgcgactagtgacacttccggaaggtctagaccttcacgtaataagtttacgcctactagtacatctatgactcctttgcgtagattttctaaaatttttactcgttccaaggtatctacatcagagtgtatatattggcaaagtacaccaattcggtctagatatttgctgagttcttcagccattttctttgtcagagtcgtaacgagaatgcgctctttccgtgcaattcgtttgtgaatttcattaacaagatggtctatctggttttgtgtcggaacaatttcaataaaagggtctggtatccctgttggtctgattaattgttccacaatgattccttcacttttctctagttcataatcagccggagttgcactgatatagattgtttgccccgttttttcttcaaattcgtcaaatgtcaatgggcggttgtcaaatgctgcaggtaaacgaaaaccatattccactaatgtggatttgcgtgcatggtctccgccatacatagccctgatttgaggaagtgttacatgcgattcatcaatgaccattagaaaatcatcagggaaataatctaataggcaaaaaggacgaaccccggctttgcgaccgtcaaaatagcgggagtaattctcaataccagggcaataccctaattcccgaatcatttctatatcgtatttaactcgttcttctaagcgtttggcttctaaaaattttccgtgatcttttaaaaataacagttgatcttctaagtctttattgatttcgattaatgcatgagctatcgtatccttgtctgtgacaaaaaggtttgctggatatatatccaattcatcttgagtgccgagtatttcacgagttatgggattgaacgaggatattcggtctattgtgtcatcccaaaattcgatgcgataggctactccgtcataagtttcgattgcaggaaaaatgtcgacagtttcacctttggcgcggaagcagcctcgcttgaattctatttcgttatttgtgtataaagcgtctaccagacggcgcaataagagattacgattgattgtcatcccttgttttaggtgagtgacatttgtaccgaatgctctggggtctgccataccatataaacatgaaacagaggaaactacgattatatcccttctgccggaaagcaaggatgctgtagtgcgcaaacgtaatttatctatttcatcattgatggctaaatctttttctatataggtatccgttgtcggtagataagcttccggttgataataatcataatatgatacaaaatattctaccgcattattcgggaaaaatgatttgaattcgccaaataattgagcggccaatgtcttattatggcttaatatcaaggtaggacgttctacttgattaatgacattggcaattgtaaaagtttttcccgaaccggtaactcctagtaatacttgggctttgcgattatctacaactccttgcaccaattgttctatcgcttccggttggtcgcctgttggcttatattccgaagtcagactaaaatgcatggctaatttaagtatttgcctagaagattgactaactctaagcggtgtatgggtttttgtagataggcatcaaattcttctgctgcaatttggtcagaataggagtgggctgtctgtgcgatgacaattgttgttggaaactctttcctgattaagtgaagcgcttcaatcccatccatatcgggcatactgatatccatcagtacgacccggatttctgggtgattatttaaaatctggagcacttctgtcccgttaactgcacggattaattgtatgtttgtgcgttttagcaatgccgacaatacagcataattgtcgtccaagtcttcggcgattaatatcgtttttgtcgaccaatcagggagttgaacaggaattgccacaataagtaaattaaagtttactcataaatttaacaggattaatgacgaaacgatcatgtatggcatgtccgatttgtcctttttcatcccacgcatcaatttcaaaacggatacgtcgaccgtctactttaatcacagtggctttgcaagtaactttttgtcctactgctgttgctttgatatgctgggtgttaatttctattccgaccgtgtcagtgtccggctccaataaaccttccaagctacggattgccgtgttttccatcaaagctaccattgccggtgttgcaaaaacttctagtttgccggaaccatatacagcagctgtatctttgtgttcgacagtaatttcttgggtaaatgttgttttgcctgcttctatcataatattgttattaaaattcagatgtaaagtggaaaatcagtttcttataattttcctgtgccatttgtagcatatattgcgagtctgccaagaaaacatcccgtccctctttgtcttttgccatgtattgtgatttgtgcttcttaaaatcttccaactcagcataatctaaagcttctatccaacaagccttgtatagattaataggttcccaacggcaggctgctgcatattcgtgcaacaaacggtattcaattacctcaaattgcaaagcacctacggtaccgataattttacggttgttgaattggttgacaaacaactgggcaacaccttcgtccatcaattggtcaatgccttttgccaattgttttgacttcataggatccgcattttcgatatatttgaacaattcaggcgaaaaacttggaattcctttgaagtgtaatttctcaccttcagttagggtgtctccaattttaaatgttccggtatcgtgcagaccgataatatctcccgggtatgcttcatcaataattgatttcttggaagccataaaagcggtaggagtggagaacttcaattgcttgccatttcttacgtgcagataattcgtgtttcgtttgaaaatacccgaacagattttcacaaatgcaatacggtcgcggtgattcggatccatattggcatgaattttaaatacaaatcctgagaatttttcttcatcaggtttgacaattcgttcttctgtttctcgtggaagtggtgatggagcaatttcaatgaaacaatccaacaattctcggatcccgaaattgttgagggcagagccaaaaaatacaggtgctacgtgcgcttccagatattcttcgcggtctaatccgggatacacttctcttacgagctccaggtcttctcttaatttggctgcagctctttctccgatatgtttgtccaattcttcagaatcggtatcagtaatctcaataccttcaggtatattttgaatattggggctatataagcatagattttgacggtgcaggttatagatacccttgaatgtatctccgctaccgatgggccagcttaacggattcaccttgatttgcagttctttctcaacgtcatccaaaatatcaaaaggatcgttggccggtcggtctaatttgttgataaacacaattacaggagtcttgcgcatgcggcagacctgcattaatttacgagtctgtgtttccacacctttagctgcgtcaatgacaatgattacactatcacaagccgtcagagtgcggaaagtgtcttcagcaaagtcctggtgacccggagtatccagaatattgattttgatatctttatattcaaaacccataacggaagttgcgacagagattcctctttgacgctcaatttccataaagtcggaagtggcagtcttcttgattttatttgatttaacggctccagcaacgtggatagctccaccaaaaagcaacagtttctctgtcaatgtagtcttaccggcgtccgggtgactgataatgccaaatgtacggcggcgtaatatttcttctctgtatcccataaattcgattttcagtaggcaaaggtactacattaaaggtaaaaggtaaaaagttagaagtaaaaagttgtaaagtgtgaatcaactaaacaaaaaatgcttaccttcgttatattgaatgaacatacaaattttatagaggaatattatgcaaatagtttacacatccaccaattttaaaggagctgttttacgagccattttggcaattattttcggtagcgtattgattgtatggccagaaaaggctttggtgtatattgtaatggctatcggtgtcgtttttttgatgacaggtattgctgcttttatcgtatccagcaaacatcgtggcgatagcaacaaaggtatgttgccggtgaccggagtagggagtatggttttaggagtaatacttatctgtataccgctcactttcgcagccgtattggtatttatgctggggttaatgcttgttatagcagccataggtcagtttttcaccttatctttagcccgtcagatggggccggtatccggaatcagttaccttttcccgatattgattctggtggcaggaattattattcttttcaatccttttgaaactgtggcaggcatttccaaaggtgcttccatcctttttggtatcatggctattttctatggcgtgactaatttatggaacaactatttattatataaatatcgtcgttccaacgaaaccgaagaaaaaatacaaaaaatggaccattcagatggacaggatatcgtagatgcagactatgaagaggtcaagtaagaggtcgtatgtttgcagctgtatttaagcaaagaattttctgtcgctgaaaattgtcaaacgaaaaagacacaaatcgttgtagtttttattaagctacaacgattttctatatttatgcttactccattctcaattccacaaaaaactccgggcggtgataatccggtttttctgtagcgatgggggcgaaggttatgtaatgcggtttggtgagtttgtcgccgcatttatagaaattgccttttgctgtaacgcctttccaggagtccaaatggtgcttgaacagggcacttgccgggattacaaccaatagctcccaaggggcggtcatacttgtttcttcaaagtttgtgctgcctaatgaagcatatctcttgatacttgaaatgatttcttctgtggcatattctgcttgtatgcgggactgtcggaaacctaacatcatcactccgatgcacgagaattcaaaattatagtagcccgtattgtccagcgaaaggaaaaattctacgcacgaatccgtgcatacctttgaattgctttctgtcattcgggctgctgcagtttcttcgtctacgatgaaacgtataaataaatccttcccgttgtgggcaatttgaaaagccacctgagggtggtacgggaattgttctttccaattgagatatgcgaggggatgggtttcctccgttgccaaaatggccttgcatttgtccggagctgtggcgtccagtgaggggatttctttaattgttaccataagcaataaattagggattacctgaccattcagataatccctgtgattctttttataatattgtagattgtccggttggttatttacggattttgtaacctgctacaccatagtacaggatgaataggaagcagggcaatgccaaccagtaagcctgctgcggtgtagtagcatctttcaagaaaccgaatacggttggtatcactgcacctccggcaatcgccattgtcaacagtccggctccggctttggtgaatttaccgaggtctgccatagcaagcggccacaatgccggccacatcaatgagcatcccaatgccatcaagaagatagcccagatagatatttctgccggcatgagcacgatagccaacgaaccgagcactccgatccaggcacagatacgcatagccatatcctggctcatgtatttcgggataaagataataccgcagatgtaaccgattaccataccgatactgggaatccatgcatacaaatcagggtttgccaattgcagtgatttggcatagtcaacggcagtactcaatgacaaggtttccactcctacatagatgaacagtgtcaatgctcccaataccaggtgagggaattgccagatagacgttttcttggcagcgtacggacagtctgctgcgcttgattcatcttcgccggctgcagttacttccggcagcggtgccaataacgaaataacgcctaagcccaagaatacggcgatgatgatatagaaaggtacatacaggtctgcaatctgtacattgtcaggatttgctacaaccatggcaaaaaacagtggtgccaccggccaggccagtttgttgcagatacccatcatactgattcgtttggcagcactttcaagcgggcctaagattgtgatatacgggttgacagatgcttgtagataagcattggcagctccgctgacaaatgatgcaagcaggaacaacgggaaactgttctgttttgccgagaatacaaataaaacgaatgctgctgcaaaaattaaaaatgaaagcgccattgtttttttgtatccgataacggagattgtcttggctgccggatacccgaagatgataaacggcaggaaggttgctgccagcaacagataggccacaccggatgatagcgacaaacttgtttgtaatactggaataaggaatgaattgatacccaaggcaaaacctaaggagaaaaacatcattccgacgaatgctaacggaagagcataattggttttgttttgtgacataatagtataattagttatataattgcacacgtttacggcaggtaaaggtatgaaaaattttaaaaagtaaaaggctaaaagtttacttttagccttttacttgatgtttaaatatctgtcgatattattttgctttcggtctgaaggtaatgtctacaatatctgcacccttcatcaaagtcttcaagaatttctgtatatccttcggagtcatcttgttcaggatatcttcgtaattcttcggatctgttgtgtccagaccgttgatgtagtagtttacaatcgcattcaaccaataactgttgtggtttttagattgttctctgcctttcaacatgttgttgattactttctgcaattcttcttgtgtcggagcttctttctgcagtttgtccagttctgcataaatcaaagatttcagatgatctgctttgtccgggtcgcaatcgaattgcatggtcaggtcatagctgctgtacggaatgcgtgaagcgctgccgctaacaccgactccataagttccaccttctttctcgcggatgttttcagtgtatcttaagtcaagaattccctgcagtacgcttaaacagaaactgttgtgtaagctgtatttcatctctttcgagaagtttgtaatcactgttgatttcggaacttctaaatctacttcgatgcttcttacagttttgcctttcggacctcttacgttattgtctctccaagtttctttgcggtattcagacttgatggagccgatgtatttttcaaccaatggcttgatagtttcttcttctacattacctacgatgaagaaaataaagtcgcttgcatctttgatacggtcgcggtatactttttcaatctgttccaaactgattctgttcagataatcttcgttatacaggatacttcttgggttgtagttgctcataatcatttgcagagagtcttgcatgattttctgcggtttgcccaataccattggcagagtactgcggttctggttcatgattgattcgaaaatctctttatcgaaacgaggcttttcaaaacgcaagtaaaccaactgcatcatggtttccacatcctgtggagttgatgctccttgaacagcttctgacagagtgttgattttcactgcactgtttgccattttgcctgtcaggatttttcctaatgcgatatcgtcaaaatctcccaatccgaaaccgcctacaaaagcagctgtgttctgtgccgataccagcatgtctgtgtcatataaagaagtaccgcctttactataagaagtcaatgttacattgtctttttcatagtctgctttgcggaatacaacctttgctccgttatccaatacccattcaactgcgctgaactgaggaagttctgtggtttttacaattttaccgccttttaattcttcgctgataagttctgctttgctgacagcatctttgtatgcttctactttagcttgttttactttagcgataatagcttcacattcttctttagtcaaatgttttacgccttccgacggaccgctgatgataattgtctggtttttgttaacgttccattcttttgcttttgcattgacttcttcgacagtaattgttgggattaatttggttacataattgtagtaatagtcaacatcaacaatcggttcattgttcagaaagtgttcctgcatttcaccgatatagctttcattattagtcttgtctttgtctttataagcagactccatgccgactagcatatttgttttaacgcgttccaattcgctttcagtaaatccgtagcggaggattttttcattttccagcaaaatggtttcaaatgcgattgcctcttcgttcggttttgccgatgcggagattccgtatgcgcaatatccttttgcaagaccgctaaagccgatgctaccgcctaggaaaggaggatttgcctggtgcattaattctccgatacggttgcctgccatagaattatagaaagatttgatgatgttgtctttcagataagcatgggtgtttttctctgcagccgatgtttcagggaacatggtgatgaactggatagatgaaccctgagcttctttgtctgttgctacgccgaaataaagctcgtcgtgttccggaatttcgtaaaatggacggggagtcggattctcgatagccggtacatcagaaaggatagctttcactctttcttccattttcttcacgtcaaaatctcctacgatagcgatagcttcaaggtctgtgcgataccatttgtgatagaagtcgcggatagtctgaggcttgaagtttttgataacgtccaaagaaccgataacgtcgcgttctgcatatttggaacctttgtacagaaccggcatcatctgtgcgcggatacggaaagatgcatcgcggcgggttctccattcttcagagataacacctctttctgcgtcgatttcatcctcttccaatgaaagataatatgaccagtcgtgcagaatcagcaagcaggtatccagtagcttttcattgtttgtcgggatagagcttaagttgtacacggtttcgttctgtgtggtataggcattgatttcacgtccgaatgcaacaccgtatctttccagggttgtaatgattcctttgcctgggaagtttttggtgccttggaatgccatgtgctccagaaagtgtgccagaccgtcctgttccggctcttccaacaatgctccggcattgcggatgatgtagaaacttgcccgtcctttgggctcttcgttgtggcgaagataataggtgattccgtttggcaatttaccgataactgtattcggatcctttggaagagggtcctgtagatttgcttgcgcaaaaatcccctggcttaaaaataagcagaagagaattgttaataatgagatctttttcatacttgaaatttttatgtctttgcaacaaaagtagatttaattgcgaataaatgtaagtaaaatagggcatttaactaaaatttaatggctcttgaggccgtttttgtttgaatgatgcaaacgtgtgaatttttttaacaaagtctgctaggcttacttttaattctattaaaatatggaggaataaggaatggaaaatgatgttttgaaagagtggatgcaactaattttaatgattgcaggtttgggaatcgcttattgggcgttaagaaaatggggattgttcatcttgaagaaggtggcggcaagaaccgggagcacctgggtgactgttttgtatgagcaaggtgttttcggtaaattcttttcattgttgccgcctgttattgtttatacgttgctttcattctttgactggaaatatgaatttgtcgtctaccgggtggtggatatttggttggtggtggtctgtcttatgattattgtctctttgttggattcggtgaaccggatttacgagagctatccggtgtcaaaggatcggccgcttacttttttcatacagctgataaaagttttcctctattcggtgacggtgattatcattgtgagtatcctggtgaataaatcgccgatgcacctgattgtcggtttgggtgcatttgcggcggtggtattgttgatattcaaagattccattttgggatttgttgccgggatacagttgactgccaacaatatgattcgtatcggcgattggattcagatggacaagaaccatgcagatggtacggtgatggaggtcaatctctacacggtgaaagtgcagaattgggatatgacgatttctacgattccgacatatcagctggtgtccgattcgtttacgaactggcggggcatggaggaatcggatggaaggcgcatcatgcgcagtattaatatagatatgcattctgtccgttttcttttgcgcgaagaattgcaaaaatatgcctcctcgcagttcttgaaagattatatcggtggaatgctccggcatctggatgatatcaacaagaataagcagacagtgcttgacgaacggcacctgacgaatatcggtttgttccgctcctatatggaggcttggttggaggccaatccggaaattaatacagatatgacccacatggtgcgtcagttacaacccggaccgacaggcatgccggtgcagatttattgcttttccaaaaacaaggaatgggtggcttatgaaaaaatccaatcggatatttttgaccatgtgatggcagtcttgctggagttcgggctgactgcgtttgaatctctttggaccgattcgtctcttgcttaaattgaatttaaattcatgacaaacagtagtcaaagataacagtctgttatctttgacttatagttgtgttatctttgatatatagatgtcatatatttgacagggagggaagggggagatgtatcggtggaaagtaggagatgtgtggatgaaaaaatgtagaaaaataattgttgataaaatctaaatgtaaaatattttgtaactttgcggacattagggagaaaagtttttgcgccggcagggcttcagttacaaccaattttttttctactttttacacatcgacatacctgtcggcgcatttgttatacttttagacattgtagggatgatttgtgcgcaattaccattttttattgtaattttgagggctaaattgtgaatttatgccaaataacaggtcaaagaggtgggaacgcctgaattataaatacaaattgtcagtcattaatgagacctcatacgaagaggtatggggatttcgtttgtcacagttgcatgtcctgatgtttttgagcgctttgggggttgtcgttgtggtgctgactattttattggtggcattcaccgggttgcgggagtttattccgggatatccggatggaaatatgcgccagatgattatggcaaatgccatccgggtggattcattggagcaggaagtgttgaagcgcgatcgctatatgcaggcattgcagatggtgatgagcggtggggatacaacggctttccagcagttgcagaaggactctttgcgggcggggtacgactcgctgcagttccggctgagcgaaacggaaagtgcttttcgggcagagatagaagagcgggagcgttttaatctgggagtcggtttggaaaaccagcccaaccatgaatactaccatttcttcccgccggtagagggagttgtcacccagcatttgaacgaaaacgagcgtcattacgggacggatattgtggcgaaggcaaatgccaaagtagcggcggtgatggacggtgtggttgtttttaccgactggacggtgaagaccggttatgtgattcagattcagcatgcaaatgattttttatcagtatacaagcataattcgaccttgttgaaaaagcaaggagatcatgtacgtgcaggcgaggtgattgctatcgtcggtaataccggcgaggagaccaccggtccgcatttgcattttgaattgtggcgggccggaaatccgttaaatccggaagattttattcagtttaaatagggatatgaaaaaaattgcaatattaggttctacggggtcgatcggaacgcagaccctgcaggtgattgaggcgaatcctgagcgattcagagctgaggtattgacggccaataataatgctcggttgttaatcgagcaggcattgaagttcaagccggatagtgtggtgatagcgaacgaagcgaaatacaatcaggtgaaagaggcgttgcagtacgaagatatcaaggtatatgccggagcggatgccattgcacaggtggtgacgctggcaaacgtggatctggtggtgacggcgatggtaggctatagcggcttgattccgaccatagaggctatcaaggcgggtaaaaatatagctcttgccaacaaggagaccctggttgtggcgggcgagtatatcacgcgtctggtggagaaacataaggtagccatattgcctgtggattcagaacattcggccatattccagtgtttggcgggcgaacggcagagcagggtggaaaaattgatattgacagcttctggcggtcctttccgcggtaaggactacaatttcttgaagaccgtgactcccgaaatggcattgaagcatcccaattggaccatgggtgcaaaagtgactatcgattctgcttcgttgatgaacaaagggtttgagatgatggaggccaggtggctctttggcgtgcagccccggcagatagaggctgtggtgcatccccagtcaatcgtccattcgatggtgcagttctcggacggatgtatcaaggctcaactgggagtgcccgacatgcggctgccgatacagtatgcactgacctatccggagcgggtggattccgatttcgggcgggtggattttaatatatgcaattcgttgacgtttgaattgccggacagaaagaccttccggaatctggacctagcctatcatgccatgacacaggggggcaatatgccttgtattctgaatgctgccaacgaggtggcggtagctgccttcctgcagggaaaatgttcgtttaccgggatgtccgacctgatagaggtggttatggcgcaggtggatttcatagcagccccgaccgtagacgattatgtggcaaccgataaggtgagccgtgaaatagcgatgaaacaattggatttgaaataataagttagagttagcatggagatttttataaagattgtacagtttattctgagtctttctattttggtagtgtgtcacgaattcggccatttcctgtttgcaaagttgtttaagacgagggtcgaaaaattctatatgtttttcaacccatggttttctctgttcaaattcaagaagggcgagaccgaatatggtatcggttggctgccgttgggaggctatgtgaagatagcgggtatgattgacgagtcgatgaatacggagcagatgaaacagccggcacagccgtgggaattccgtgccaagccggcttggcagcgtctgttgattatggtgggcggcgtgttggtgaatgtgctggtggcttttatgatttatataggcatcctgtacacctggggagaaacctacctgccggcaaagaatgtcacatacggagtggtgtgcgatccggtcttcgaacgtatgggcatgcagaaaggcgataagattgttgcattggatcatcgggaactggaccgtttctcggatattattccggaaatcctgttgaatacccctcagacaatgcaggtggtgcgcaatggtgaagaggtgactttgcagataccggagacgctggtcaacgaactgctggaaatgtcgtctaaaagcttcagcctgaatccgctgctggtgccgagacgtccggtggaaggggtggaaatcggcgggtttgcggattattcggtggcatacgatgccggtctgcggaaaggtgacaagatattatcgataaacggtcagggttttgcattctatgacgagtttacggatgctgttgaggcgaacaagggcgagagtgtcgagacgaaagtattgcgagggacggatacgctgacattcaatttccttttgggcaacgatggcaaatttggaatatatgctgcgttatctccgctctcctttgatttggtgacaaaagaattcaccttttttgaagccgttccggcaggaatccggatgggggccaatcagttgggggcttatgtgaagcagttgaaactgctcttctctcagggagagacagccgtaaaatcggttggcggttttgcttcgatagccaatgtattccccggaatctggagttggcccgacttttggagtctgacggctttgatttcgattatgttggcggtagtgaacatactgcctattccggctctggatggcgggcatgtgctgttcctgctgtacgaggtgataacccggcgcaaaccgagcgagaagtttatggaatatgcccagataggcggcatgattttcattttcggtctgtttatattggcgaatgtgaacgatatcattaaattttttggataatggacgataaagtaaaggaattcagagagtatcgtgccaagatgaacgaaaagatcctggcatcaaacaataaggtaatcaagcgtatttacaacatcgacaccaatacctatatggatggagccttgtctgcaaaagtgaaggagatgttgggacttgccacctccatggtgctgcgttgtgacgactgtataaaataccacctggaaaaatgtcacgaacagggggtgactacggaagagctgtttgaggtgtttgccgtggcggatgttgtgggaggcacgattgtgataccccatttgcgcagggctgtagagtattgggaattgcttgaaaacaccaaataaataatgaaagcgtttgttgcggtctttttgctgatattggcaggttgtttgagaatatcggcacaggaatgttatcgggtgatgttctacaatgtcgagaatttgttcgacacttcggatgatgccttaactcaagatgaggaatttaccccgcatggtaaaaaacattggaccaaagaccgttatgtagataagttgcgttccttggcgcgcgtagtcgacagtgtcggaggtggagagtggccgttgatggtggggatggctgaggtggaaaaccgtcgggtgttgggcgatttgacccgcaagacacgtttggttcgggggaaatacggtattgtccatcaggattctccggatggtcgggggatagatgtggctttgctttaccgtaaagactgcatggagatattgtcggaagagtttttgcgggtggcttttccggaagataccacgataaagacccgggacgtactgtatgccaaaggggtggtattaggagcggatacgcttcatatttttgtctgtcatttcccttcgatgcggggaggagagaaacagagcgagtggaagcgtgaacgggcggcagcagtggttcgggcaaaagtggattcgttgtttcgtatcaatcgggatgcagccgttgttattatgggcgacctgaacggcaaggcaaacactccggctcatcggatattgtgtccgcaagcagggagtcgggacttccattccggtgagctgtacaatccgggttattatctgttgaatgcttcgcatggcagctatcgttatcgcgggcagtggcagaccatagatcatattctggtgttcggcagcctgctgaacggaaagtcatcgcttcgggccactccgaagaccgaggtatattctgcttcattccttttggaggaagacaaaaagtatttcggatttaaaccattccccacatacaaaggtccccgttataccggcggcttcagcgaccatttgccggtgtatatcgggataggtagaagataaaatctttcgaggtaaagtattggtacgaatgtttaatttttcactatctttgtttacttaaagatatacaaatgggaaaaaagccaatcatgataagtagtcacgatgtgacaagtcagtcttgatttgcagaaagaattccccaatagcaagggacttagtgccgataacttatgggcgatgaaacgatggtactctttctatgcagataaatttcaggatgaaaaacttgtacgctgcgtacaagaattgtatgattctggtaatttggcaattacgtcaggtgttataccttttcctgaaatgtttggattaataccttgggggcatcatttggatgttgtcaggctttcaagcaccttgcctgaagcggttttttttgaaaaaaatcgccgaattggcaattatcttgaattagacggttattcggattgcttgaaaattgggtaacgagatagcaaccgttcgtattctttattatcgtcagctagtggctggcgaaattaaaatgttgtagcaaataggcacaacaatctaattaccttataataataaggtggaagcatcttcttttatacaactactataagcgctcatataaaaattttgcgagaaatccaaacaaaaacgaggtaatctctaattgatttcttaactttgcaaacaaattaagagtactatggatattaagaaacatattacagctttgggatttgttccaaaaaacggaacgaatggcatttatcataaaatatatgttgattatgccatagagattgattttgaaaaacaaagcattaactacggtagtggtattactgccgatagtaagactactcaaaatttttctgatgcggaaaattttgtagtacttgagtgtgttgatagattactcacaaaaggatataagcctcagaacttaattcttgaaaagacttggccgtcaggacacggtacatctggacgattggatatttgtgttaatcgcgaagatggtacaccatatatgcttatcgaatgtaagacttatggcaaggagtacaataaggagttggcaaaaatccgtaaggatggaggacagctatttacttatttccaattatctggtggtaaggctgatgtgctaatgttgtatgcatcagaattgaaaggaaataagtttgtctatgttaacgagattatcaagattgaagatgattatcgcaatggtgatgttaaagacatttatgaaaaatggaataaactcactaaggataacggtatcttcgattcttgggtacaaccatataatttccagagcaaggctttaacaaaagaacagttgaaggagataaaagcagaggattcaagttttatcttcaatcgttttcttgaaattctgcgtcacaatgtagtatctgacaagggtaatgcttttaacaagatatttacattatttttgtgtaaggtttatgacgaaacaaccacaggtgagggagaagagttaaagttccaatggcttgagggtcgagataaccacgtagatttccaacttcgcttgacagacctttatagtaaaggtatgaaaaagttcttggatagaactgttagtgacttcaataatgaggatttcgacaagcgttgtgcaaatctaacaccagagacaaaacaatatcttcttaaagaggtaaataaactccgtcttgaaaagaataacgagtttgcaatcaaggaagtatatgacaatgcctcatttgaagaaaatgcaaaggttgtaaaagaggttgtagagttgattcagggatacagaatcagatacaacaagcgacaacaatatttgtcagacttctttgaattacttcttactactggtctcaagcaggaggctggtcagtattttacacccgtacctattgcacaatttatcataaagagtcttcctttggattctattatggcagaaaaattatctcgcaaggatggtgagattttgccatatatgattgactatgcggctggtagcggtcactttatcacagagtttatgcacgaaatacaagacatcataaacgcttgtgatacatttaagtatattgaggaaacaagaaagcaccttatcaattggcagaattgccattttgattgggctacagactatgtatatggcatagaaaaggattatcgacttgtgaaagttggtaaggtaggatgctatttgcacggtgatggtttggcaaatgttatcttaagcgatggactagccaacttctacaatagcaaagagtataagggtaagctacgcaaacaggtaaatgacggacaaaaggataaccaacagtttgacattgtattgagtaaccctccatactctgtatcatcattccgccaaactactcgtgattactatacagaacaagattttgaattgtataattctctaacagacaacagttctgaaatagagtgcctttttattgagcgtacgaagcagttacttaaagatggcggtatagcaggggttattctaccaagttctatattgagtaactcaggcgtttacactaaggctcgtgagattatattacaatactttgatattgtcgcaatagcagaattgggtagcaatacttttatggccaccaatacaaatactgttgttctgttcctgcgtcgtagagataactattttgcagcaaatacaaagtgtgcagttgacacttatttccgcacattaaatgatgtaactattaatggcattgaaacacctgcctcaaaatatgtagctcacgtttgggagggtctcgaatatgccgattatgttacattattacagaaatcacctaatgataaggtaaaggcacacgaaatttatgcagagtacaaaaagaaaatctcagcaaagagtgatgcaaagttatatgaggcgatcttaaatattgagactgaaaagcttttgtactttattttggcataccctcaaaaggttgttattgtaaagagtggtgagaaagatgttgagaaacgctttttaggttatgagttctctaatcgtagaggcaatgagggtattcatgctatacagaaaggtaggaacattgatgagtgtaccaagctcttcgatactaatagctatgacaatccagcgaaagccagtacttatgtatatagggctttcaatggtgattacacctcgccaatagcagaggaaatgcaatcgcatgttggttgtgtgtcattgattgatatgctcacttttgatagactgatttttgaaaaaagcataaacttaaattcaaaaaaaaaagcatcttttgatagtcgctacaccctaaagccaatagataaactcgcaagttttcagagtggcctatggaaaggtgaaaaagggacattacaactgacaaaagtcttacgcaatacgaattttaagttaaataatggctttttagattatggtgatgttgcagaaattgaagttgaaaaaactcaattagctacacgcacattgcagtatggggatattatattagaaaaatctggcggtagcgatactcaagcaattggaagagttgtattatttgataaaactgataatgaaacatactcttactctaatttttgttcaaggattagagtaagagatgattcagaagtgaatccgatatacttgtggattattttgcacaatttttattgcaaaggaggaacgatacctttacaaaatggcattagacttcttaatatagacatgaacgggtattcaaagataaaaattcctgttccgccaattgaggtccagaaacagattgtagaggaaattggtaaggttgagaagtccaataatgatgctaagtatttaattgacaagaatctttcagatattagaacaattatagatggtttaagctctgccgtaagtataaaagagtattttgacataaatacacaaacattgaatcctacatcttgttggaaaaacgagttctttacatatgtagatattgattctgtaggcaaaggtgatggtagagtatcatttgataaaattatattaggcaaagatgctccatccagagcaagacgtgttgcacaagataggatagtggtagtgtctactgttcgcccttatctgaaaggttttgcatatatagagagtgttccggacaagactattttctcaacgggttttgccttgcttaagtctaaaaatgaggatacttatatctctaagttgttgtactacttgtttatgttctctgatgacttaatgaagcaaatggaaaccgctatgcccaaagcagcttatccaagtattaacaaggaggatattgacaactttaagattccattattgactattgatgaacaagaacgcatcgtaacccaaatagaagcattagaattagagattactaaggctcgcactttgatagaaaatgctgcaagtgagaaacaagcaatacttgataaatatttgtaaaaatgagtgatagtaagaatgataaatgtatttctttggagaatatgtacaagaaaatgatgagtacattatcctctgcaaattatgattattctaaatgggaaaaggttggtgatgtatataagcaattttccatttatgatacatctaaatatgaatcgatgtcagtatgttttgattgtttcttcataaaaaagtaacttgaaaatattatttttgctagcataaaattcataacaatagctatggacgattattatcaacaggtttaggcaggcaaaggtggactcaatgcctttgtttgccgatcgaaatgacaaaaaaggtattatgagaaaatttttggattgcaaaaacgggtttgctgagcagaaggtgtggcagaccggctgctggattagtgtggtgaaaccggcagaggatgatgttcggtatctgacggacgagttattgattccccaggcttttttatcggatattgaagatgtggacgagcgtccccgtatggagactgaagacgggtggacactgatgattttgcgtattccttatcggaatgcgcatgacgatattccttttattaccgtgccgttggggattattatgaatgaagattgccttgtgaccatctgtcactatgaaacggatatgttgccggattttctggtttatatgcggagaaaaggattggaggtgcagaataattgggatttgttgttccgcctgttcttgtcctcgtcggtgtggtatctgaagtatcttaagcagttgaataatcaaagtcgtgcggtggaaaaggagttggaacgctctatccagaatgcagaactgcaaaggttgttgaagattgaaaaatcgttggtgttttttatcacttctttgagaggtaatgataatctgctgataaagttgaagatgttgaaaagtcagcggcagtattttgatcctgaactggtggaagatgtcgaaatcgaattgcggcaggcacaggatacttcgaggatttacagtgatatcttgagtgggacgatggatgcttttgcttctgtgatttcaaataatctgaacgttatcatgaaacgtatgaccgctatttcgctgttgctgatgattccgactttgattgccagtttgtatggtatgaatatacagaacggcttggaggaggctccttatgggatgtggctgattgtcgtgatctctgttttgttttcggtggtgactttttggttgtttaaaaagaagaagtggctttaactatttcttaacattccgttgtttaaactttttcttatagatgttgtctaacaacatgaagaaataagtgtaattagattattttgatacattatgagaaaaagtttgataaaacccttgcaaaaagtattttctttggttttgtctgtgagtctttgtgtgctgtctgtcggctgtggatctaaaacagacagtggtgcggctccaaagaaaaaaactgccggcgtgctgccggtgaccggtattgtggctaagacttccatgactgctaacggcattccggtgaatggtacgatgttggcgaatgaagaggtggaattggtgtcggaaattgtcggaaaggtgaagaaaatctattttgaggagggggctttcgtgaaaaagggacagttgttgctgaaggtggatgatgccgacttgcaggcgcagttgatgcgggcgcagtttgaacacaagttgttggctgagaagttggagcgtcaacgtattttgttgaagcgcgagtctatcagccgggaggcgttcgatcagctgcagaccgattataatatgctcgaagcggatattgaattgttggaggttaaaatcagccgtacggaaatcagggcgccttttgacggagagatggggttcaggtatgtgagtgagggtagttatgtgcaggctagttcgaaaattgctacgattgtggataattcggtgttgaaatatgagttttatgtaccggaacgatatgccagcaataagttgaatggcaaggaggtgatgtttaaggtgaccggaagcgatgagttgtattctgcgaaggtgtatgccgtagaccccttgattgatgtgaagactcgtatgatccttctgcgtgcccgtttccaaaatagcaagcatgaattgatgccgggtatgtttgccaaaggtaatttggtgttgggcggtaaaagtgaatttatcgcagtgccgacagaagccgtcgtgccggagatggacggaaaacgtttatgggtgttgagagacgggaaggcggcgagcgttcctgtggaaactgaaagccgggacgagaaaaatgtagaggtgatttccggaattgttgtcggcgatacgattctgacgggagggcttatgcaattgagagagggaatgaatgtgtcggtgactttgaaacgttaagagtgtctgtacatcatcaataaataaacaactgacaaatgagtttatcatctacctgtataaaaagaccggtgtttgcaacggtgatgaatattatcctgatgatattggggtgtatcggtcttgtgtttttaggtgtccgtgattatccgagtgtggacccgcctattatttctgtatctaccagtttccccggggcaaatgccgatgtaatggaaacacaggtgacagaacccctggaatcggcaatcaatggtattccgggaatccgttcgttgacgagccaaagccgggatggacgcagttatattacggtggaatttgagttggaggttgacttggagactgctgcaaatgatgtgcgcgataaggtgtcgggcgcaatgtggaaattgccggatggtattgattctccgaccgtcagcaaggcggatgcagatgctcagcctatttttggtgtttcgttgcgtagcgacaaacgttcgttgattgatctgagtatgtatgccgagcaatattataaggagaggttgcaaacgattgccggggtaagtagtgtgtcaatttggggtgaaaaacgttattcggtacgtttgcgtatggatccgtcgttattggctgcatacggtgttacgccgatggatgtgagggatgctgtgtcgagggagaatgtggagttgccttccggacgtattgaaggagataatacagagttgactatccgtacattggggcgtttgatgacaattgaggattttaataatctggtgatcttggaggatggagataaggtggtgcgtttccgggatttgggggttgcggaagtggatgctgagaatacccgttctattatgaaacggaatggtgtgccaatggtggcttgtgtgattattccgcagccgggagccaattatattgacattgtagaccgtgcctataaggtgatggaggagatgcagaaggatttgccggatgatgtggaggctggggtcgcttttgataatacggtgtttatacgcaattctatcaatgaggtgaaggatacaattatagaggcttttgtgctggtggtattgattattttccttttccttcggaattggcggacaaccttgattcctgtattggctatcccgatttctttagtgggtgctttctttgtgatgtatctggctgatttttcaattaatattttgacgttgttggcgattgtgttggctatcggtttggtggtggatgatgcaattgttgtgatggagaatatctattcgaaaatcgagcagggaatgtcgcctttggaggcaggacataaaggttcgaatgagatttttttcgctgtgattgcgacaacggtggctttggtggcggtatttgtgccgattgtctttttgcagggtactacaggtcgcttgttccgggagtttagtgtggttattgcaggtgctgtggtgatatcgtcttttgtggcactgacctttactccgatgatttcgaccaagttgttgacacgcaatgtgacggataactggttctaccataagacggagcctttgtttgagaggatgatagacggatatcgccgggcgctggatgcatttatgcgggtgaggtggttggctcctttggtgttggtgggtaccggtattgtgatttggttgttgtgggcaactcttccgtctgagatggctcctttggaggaccgctcgaatatacgtgttaattcgactgctccggaaggtgcgacttttgattatatgatgcggtatgctgatgaattgggtgaatatattgaaaaggaagttccggaacaggataagattatacagatgattggcggtggaaatacgaatcgagccaatgtgaatctgtggctgcaggttccggaaaaccgagatagaacacagcaggaaatagcggatgaattgtcgttgaaggtgcgcaattttacgggagcaaggacgatggtgtctcagcaacagacgtttggtggccgacgaggaggtttgccggtggaatatgtaatacaggctaaaaatctggatgatttgaaacgtgtgttgccccgttttatggatgaggttaataaaagtccggtgttttctgtggcggatgtgaatttgaagtttacaaaaccggagttgacaatcaatatcgacagggataaggctgccgtgttgggagtttcaatgaagaatgttgctcagactttgcagctgactatgagtgagcagcgtgtgggatattttatcttgaacggtaaacaatatcagattttaagtgagattgacaaggcttatcgtaataaaccgtctgatttacagaatatttatgtgcgtaatgataagggggaattgatagcattggataatctggtgacgactagtgaaagttccatgcctccacagttgtatcgttacgaccgttttgtggcagctacggtttctgccggattggctaaacgtcagacgatttcccagggattggctgaaatggaccgtattgcggcagaggtattggatgataattttaaaacgacgctttccggtagttctaaggattttgtcgagagttcttccagtttgttgtttgcattcttgttggcactggtatttatttatttggtgttggctgctcagtttgagagtttcagggatccgttgattatcatgttgacggtgcctttggctttgattggggctatggtggctttgtggtggtatggacagacaatgaatattttcagccagatcggtattatcatgttgataggtctggtgtctaagaatggtatcttgattgtggaatttgcaaatcagcgcaaggcgatgggcgaaccgcttctggaagcggtgaagaattcggcagtggctcgtttccgtccgatattgatgaccagtttatctacagtactgggcattttaccgatggcaatggctacgggtgccggagcagagagccgggtggctatgggtattgctgtggtaggaggaatggtttgtgcgactttcttgtctctgtttgtgattccggcaatttattcttatttgtcgaaagagttgaagaatgtagtgcgagaagatgtgcacaaagagtaggtggagatgataaatgaatcaactttatgtagtttatgaaaaagaagatttttatatatataggtttgatagcaggggcctatttattgtcggctcttggagctgtttgtaatgctcaggattattcggataaaaaggtaatgaccttggacagttgtattcggcaggcattaagggccaattattcgatacagattatccgaaatgcagagatgcaggctaaaaataatgtgaccataggaccgtttctaccgacagtggcgttgcaggcttcacaggaccagacgattgcaaacagcaagacggaatccaatggggtgactaatactcagaattgggcgcgttcaaatagtttgtctgccggtgtcgctttgaattggacattgtttgacggtatggagatgtttgtcactcgcgatcggtatgaggaattaatggcaataggagagttgaataccaaagcggcagtcgagaatctgattgtggaggtggcctcgtgttactatgaggtggtgagacagcaaagtaaggtggatgcagcgagacattcgctggatttgtcgatgttgcgttataaggaggcttacgataaatatgtgttgggttcgttatccggtctggaagcgttgcaggcaaagttggacttgaatgctgacagctctacatatatgcaggagcagcaggctttgaaaagtgcttatatcacactgaataccgtgatgaatgccgatttgcatagacatcagtatgtgaaagattcgattgtattgaggacacctcttaagtttcgggaactagagcggaatgtattggagtataatacgactttgcaaattggccgaagggattgtaaagtatcgaaattggatatgaaaattgcccgtgcggctttgtttccaaaattagattttcaaggaggttataattttagccagacaaagtcgccttctaaagtgacaaccttgaaccgttcggatggaccttattggggtttttctctcagtatgaatgtatttaaccgtttggaaaaccgacggaaaatcaagaatgccaaattagatatggagaattcggaattgacttaccaagaggcagaattgcaggtaaaatcggatttggcacaattgtataatacttatacgaataatttgttgttggtgaattttgaaaaagacaatgctcgcattgcttttgaaaatcttgatgctgcaatggaaaagtataagttgggttctttggcgggaatagaatttcgtgagtttcaacgcagttatattgatgctgttgacagggaagtttcggcattatatgatacaaagatttcagagttgtcacttttgctgattagcgggcagattatgaggtaaatttctaaattattcgtatctttgttggcagagtaataactttaaaaacgaaatgtaatgtgtcgagttttaattatcggtgccggtggagtaggtaccgttgttgcgcataaagttgcgaaaaataaggtatttactgatattatgatggccagccgcactaaatcgaaatgcgatgaaattgcagctgcagttggtggaaaccggattcagacagcacgtgtggatgcagatagcgttcaggagttgtgtgaattgatgcgctctttcaaaccggacatcgtgattaatgtggcattgccttaccaggatttaactatcatggatgcatgtttggaatgtggcgtgaattatctggatacggcgaattatgagccgaaagatgaggcacattttgaatatagctggcagtgggcttatcacgatcgctttaaagaaaaaggtttgactgccatcttgggatgtggattcgacccgggagtttctgctatttttactgcttatgccgctaagcatcattttgatgaaatacattatttggatatcgttgattgcaatgccggtaatcatggaatggcttttgcaacaaactttaatccagaaatcaatatccgtgaaatcacacagaacggacgttactgggaaaatggtcagtgggtgaaaacaggtcctctggaaatacacaagagcttgacttatcctaatattggagaacgtgattcttatctgttgtaccatgaagagttggagtctttggtaaagaattatccgactatcaagcgtgcccgtttctggatgacatttggtcaggaatatctgactcacttgcgagttattcagaatatcggtatggcacgtattgatgaagtggaatacaatggaactaagattgtgcctttgcagttcttgaaggctgtgctgcctgatccgaaatcattgggtgaaaattatcacggagaaacttctatcggttgccgtattcgtggtattaaagatggtaaggaacatacttattatatctataataactgtgaccatgaggcagcttataaagagaccggtacacaggctgttagctatacaacgggagttcctgctgctttgggggctgttatgtttgcacgtggtctgtggaaaggtgctggtgtatataatgttgaacagtttgatccggatccattcttggctgaattgggagaacaaggattgccttgggttgagaaatttgatatcgacctggaggtatgataaataaagatattattctgaagaattgggatttgtccactgtgccttcgccgtgctatgttttgcatgagactttgctagaagagaatatgcgggtgattgataaggtgcgaaaggctacgggcgtagaagttattgtcgctttgaaggctaatgcaatgtggagtattttcccagaactcagaaagcattctgatggagccactgctagttcgctggcagaggctcatctcgtttttgaggaatatgggaagccttcacatacgtatgctccggtttattctgagaacgaaattgatgaaattctgagttacagcagtcatattacatttaattctttgagtcagtatgatcgctttggtgaacgtgcacatcaggctggtgtttcttgtggcttacgggtgaatcctgagttttcaacggttgagactgatttatataatccggcaagcccaacatctcgtttgggtgtccgttctgttgatattgctgaatggccagagggtgtagagggattgcattttcattctttgtgtgaatcgcgtcctgctgatttgcgaggaaccttggcggccattgaagaacgtttcggacgtttttttcataaattgaaatggctgaatatgggtgggggacatttgatgacccacaaagattacgatgaagatgaattgattcgtatattatgtgatttcagggctcgttatcctcatttgcgggtaatcttagagcctgggagtgcttttacatgggatactggttgtttagtgtcgacggtggaggataaagtatttaatggtggtacaaatactttgatgttaaatgtatcttttgcctgtcatatgccagattgtctagagatgccgtataaaccggtcattttaggagctcatgatcctgaagagggagaaaaggtatggaagatggggggaaatagctgtttggcaggggatttttatggagattgggcatttgatggaggacgggagcctcaggtgggagataaaattgtttttcgggatatgattcattataccatggtaaaaacaacgatgtttaatggagtgacacacccttctattggtatatggaatcctgaaaagggttttcgtttggtaagaaaatttggatataaagattataaggaacggatgtcttaaaggcatccgtctctattttgtacatatgtacgccacttttctatgagttgttgcatatcttgaggtatttcagaatcgaaggacattcgtttgccggtagtcgggtgttcaaatccgagagtcttggcatgtaaggcctgccgagggcaggtttcgaaacaattgtttacaaattgcttgtattttgcaaacgtagttcctttaaggatttcattgcctccgtattctttgtcattgaatagcggatgtttgatgtatttgaaatgggcgcgaatttgatgggtgcgtcccgtttctagtatgcattccactacgtttacatagcctaagcgttccaatacacgatagtgtgtcactgcatgtttgccgtgactgccatcaggaaagcatgccatcactttacgatttgtcaggttacggccaatgtgtccaatgattgttcctgtctctgtatcaaggtttccccaacatactgcaacatatttacgatcagaagttttatgaaaaaactgagatgccaagtggtttttcgctttttcagttttggcaatgactaaaagtccggatgtatctttgtctatgcgatgtaccaaacctggacgaggatcgttttctttgaacaaaggattgtctttcagatgccaagctagggcattaaccaaagtacctctatagtgtccataagaggggtgtaccaccatccctgctggtttgtttacaaccatgaggtcatcatcttcataaacgatatttaatggtatgtcttccggtattatttcaatttcccggcgaggatatgacatgactactgttacaatatctttcggtttgactttgtaacttgattttaccggtttgtcgttcacgcgtatattgcctgcatctgcagcttcttgtattttagtgcgcgaagcattgggaagtcgtgtcataagaaatttatcgacacgcaataaattttgaccgctgtcagcttctatgcgatgatgttcatagagttcagatgttgcttcctcttcctcgtctagcagttcttctatttcttcaatctcctctatcatactatttcttaatcagaatggtatctaaagcggttattttttctttgtcagctgtgatatataaatcgatggcacttccttgctctataggaaattctgtgtctggattttgttggtaaataatggagtttgagcggttttccggagtaatgcttccatccggaatgatttctcctatatttagataagatttccttatgaggttgatggcatcttttaattttttgcccagcaagaatggtacagttactgttgtgttgttattcccgttgcctaaaacaatgtcgatgattgcgcctttggcaagcagttcattggggagtacatcaactccattatgtttgagggcaagcaccaaatttcggaattcagaaggaatatattctattttaccgatttggaatccccgtgcttccaatgtttgaagggtttgtctgtaggctgcattctttagattggggaatactactttttccggattacgtgcgttgattgtcaagtgaagcatacgtccttctttgacataggaaccaggcgttggatattgttcaacaattgctccaggctcaatgttgtcgtcatacaatgaatcaatcacttgtatttttaagcccatttgtgctgtgattgtttgggcttcctccggtgtaaagttttggagtgaaggtactgtgataaaggagccgtgttccgtataatcatctagccaatacagtacataggtgctgattccgcaaacaagtatcaatgcgacaagtagattgatcaaaaagaatttgaattttgcaggtatttttttcatagatatcataataatgatgcaaaaatagctcagtttttttaattatctatgactttattcctaaatttgccacttaaaggttctaaatgatattgatttaattattaggaatgtatatgttcaaactttcattggttattttgctttcctgcctatttttggaaatatttgcccaagaggttaaaatacagaagtcaacagaaattgttgttataagaggagagagttattatttgcatactgtgctgcctggacagactctttattctatctgcaaggtttataatgtatctgtagaggaactgaaaaagttaaatgacaagaaggaggataacctgagtctttatgaagtgttgaaggtaccttatgtagaagtgaaacaggataacaagtattattatcataaggtggcaaaaggagaaacgctttattctattgccaggtattatggaatgaaacctaaaaaactgataaagcataatggggattactcaacttatcgtcctttgtcggtaggggctgttgttaaagtgcctttgaatgatatggatcgttcaaagattcctgttgagagtccgaagaaagagtcggttcatgtggaaagtaaagacgaagtaaaatcggatatagtaaagcctgaaagtgtcacacagacttctgatttgagccatagtttgacaacagtgccggatacggtaagcgaaacggctatccaagaaccatttgttaaagttgcattggttttgcctttacatgccaaagaatatcctacctatagggattctcttccggagtttcagactgtaaagatttctgcacgtacagaacagtttctgagcttttatgaaggtgttttgttggctgttgatagcttgaaaaaaatgggtcggcagattcatcttcatgtttttgattcagagaaaaattctgcaaatatgcaggctcttgccggtgaacttgaccgattggtgccggatttaatcattggacctgtgtactcttctgttgctaaaactttggcggaaaacttgactcataaaaatattcctatagtatatcctttatcttctagaggtgataatttaggtgtttatcagaatgtaatacaagtcaatccctcatttgcctgcatggcaacttatatggcagaatggttgaaaaataaaagtaataatgctaatattatccatatccgcacttataatgaaggaggtgatgctgctgatcggcaacttttaaaagagcagtttgcaaaagttggaggcatgcgttcttttacctggaatctggagcgaataacattggattctttgaaatctatgttggtgccggatcaggaaaatatcattgttatcccgacaactaaagaggctgatgtcagtaaaatattgccggtattaactgcttttgtggggagttatcagctttctgttgtcggactacctgagtggcagcaattttcatcgatagattttgagaatttttataagttggatacgaagttgtttacttatagttatgtagattattcttcaaatgcagctaaagtcctggcggaaaagtatcgtaagtacttttattcagagccttctacgttggtttataaagcatttgacatgggtatgttttttatcgagttagcggatacacatcggtataatactttacatgttataagtgaccaaactcgggaaaatgatttttctttgtttaagtttggcaaaatgcttaatggagttgctctggaaaaccaagcgttctatattgtgcatttttcttcggattatcagataaagatagaaaagtaccaataatcacttggttactttaccgccatacttccatgtctttcggtaataatcttcatccaggttactgatgatgactcctttagatgtggaagcatgaataaagtatccgtttttaaggaagagccctacatgacttatttttttacgtttcttgtttaatgtgttgaaaaaaacaagatctccggcttttagattgcttttccctatatggtgacaatcattttttgcaatgtcttctgcagaacgtgatagttttttgtgatatacttcttggtaaagatttccaactaatccggaacaatcagtccctttaagagtcattcctccgcttcgatagggaactcccaaccaatgggaggctgctgtataaagtcgtaagttgtcttttttgtttagtttaaatcccaacttctttgataactgctctcgctgcattgcttcttgtgccaggtgtttgctgctgctacaagaagatgaaagaattagcaaggataaaattccgataatatagattaatttcattgatttttttgaaatatgtagtcgttaataccaagttctttgtatgtgttttccagttctttgtcattatctgtgatgactaataatttgtctccgatgtcaagcttgctacgtcctcggggaacaaaaaaatggttgttgcgcttcaccattaccactaaggtattatccggaagagttaaatccatcagatgattgccgttggaaagtagattgtcggatacctctatttccgacattgtagatttgatttcttctggaagttccatgccaaagtcattgccttgtttggcttctttttctgccagaccgagggcatgagccatgaagctgactgttgtaccttgagtcaataatgaaacgatggtgataaagaatacaacattgaaaatcaaggatgcatattctatgtgtgcaattagcgggtaggttgcaaagatgataggaacagctcctcttagtccaacccatgaaacgtataatttggctttgctgctcatctttctaaaaggcgcaagacagagaaaaacgctgatgggccgagaaaatatgaccataaatatactgactagcaaacccaatcctgcaactggtagcaattcatgagggtttacaagtaacccaagagtgaggaacattactatttggaacaaccaagtgaaaccgtcaaaaaatgtggcgacactctttttatgctgcaccttgtgattgccaacaaccagacctgcgatgtataccgctaagtaaccattcccttttactaattctgttatcgaaaaaataaagaatacaaaagccaatagtaaaatagggtataaagaggtgttgtctacattcagacgattcatgacccatacggctactttccccaatagaaaaccggcaacggcaccaacgctcatctgtatgagaaacatcatgaatgagtattccatacttacttctccagccggggcttggatgatttgtattaagagcaatgtcagcatgtaggccatggggtcgttacttccgctttctaattccagcattgggcgcaattgttcttttaagccttgtcgtttgcttcgtaatatggaaaagacagaggcagaatctgtagaggacatgacggctgccattaaaagagcttccgtgaaactgattgctgcgtattggctaaaaaagtcgcatacccaatatataaatatgcctgtgaataatgttgttaaggcaactcctaaggtggctaaaataattccttgtcccaagactggtttgatttcagcgaattttgtgtccatgccaccagagaataggatgatactcaaagcaatcattcctataaattgagcactggcagggttatcaaattgtatgcctaaaccatcgctgccaaataacataccaactcctaaaaacaatagtaaaacaggtacaccaaagcgaaaaccggctttgccggcaatgatgctgaaaaataaaagcacagcgccgatgagtaaaatattgcccgtgtcaataatcataaggttttaataataaagcgttagtaatcctatgcaaaaataaaacaaatagtttatattcaaattatatgccatgtaaataaagttggaagcttttttaaaaagcatctgtaaattgtttggtattattccgatttttcatatttttacttttggaatttatagtaaatatggatttattttttgagttatgaataagattgatttggaagaattagcattagcctatcctgataacgaagatttgattcaggtatatcaggattggggtgaaacagaatatctgcaggaactttttactgtattggatagctacgaaaaagattggaacaaagaaaaagaattgggaagttgggctgctgagtttattttggatttattgcaagaagaggaaggagagtgggagaatatgactcatgaagagcgaatagaacggatggatgagcttttggacgagcgttatgaagattttcgtagcagtcatcagtttgcacgaatcaataacatcaatctctacttgcaggaaggcgaagatttggacgccatccttgcagagaatgatgataaaatcatgttcccgatttattatcgggaagagtaattttgattacaattttcaacagccacttttatcactccatccagtctgttttcaaagatacgataggcttcttctatatctttgagagcaaaccgatgggtgatgagaggtgtggtgtcaattttcccctcttctattagtcggagtatttcttcgcagtcacaaccgtccacgcctccagtcttgaaggtcagattctttccatacatttccggaagaggaagaagttgcggtttatcataaagggctacaactgtgacaattgcattgggacgggcacattcccaggctaagcggaaggagtcgttgctgcctgccacttccaataccacatcggctccgccatgctcactatgtcgggatacaaattccttacaattttcaggttctgttaccagcacatccggataatggttgtggatgaattggatgcgttccggcgacttttcacaaatgataatgcgtcgtggagtgtataacatggcacatagtaaagtacatactccggtaggtccggctccgatgataagcacagtgtcttcggaagagatttctgatatacgggcagcccaaaatccggtggcaaggatatcgccgacaaacaaggcttgctcattgctgaccgtatccggaatccggtttagtccttggtccgcatagggtacacggacatattcagcctgccctccatctatccggcaacctaatgcccatcctccatgagggtttgtacaattgtttacatagccgtgttgacagaaaaagcattttccgcagaaggtctctacattcaccgtaacgcggtcgccgggttttactcgggtaacggcatctcctgtcttttcaacgataccaaccatttcatgacccacagtgataccaggaacagcccttggaacactcccgtgtttgatgtgtaaatcgctggtgcagatactgctgagagttactcgtacaattgcatcgcgtgcatcttgaagttctggtatcggtttctcggtcaattcgaatttgcctttttctatataggagaatgtaatcatatcatttgctttattgtcggatgacaaaggtactaataagtttgttgttgttaatctgttgtgacttttattttactgctgcttggtccggagcgcttcacttgaatttgtgtacgaatgcgggtagcaagttctgcaacatggctgatgatgcccactcgtcgccctccgaattggtgtagtcggtcaagggtattgatgacaatttcaagatactcattgctgagggttccgaaaccttcatcaatgaatagggtgtctacgttgattttctctttactgatggctgaaagtcccaatgcaagagcgagtgacacaataaagccttcgccaccggacagcagtcctacattgcggatagctccaccttggtggttgtctataacattgatggttaacgacccgtctgcgcattccagttcatagcggttgctgagcatttgcagataatagttggctttttccaacagagctctcagtacatagctttgggctatttttttgaatttatctccttgggctccgccgaaaagactttccaattgattccaattgtctttctcatggcgcagttgctctagcagttcccgtttgtgcgtgagaagttggagtcgctccgcattattgttaagaatggtttgcagcctaattctttcttcatgattcgtcttaacaatggtgtcaatgtcattttttttatccgtcagactttcaatggaagcgtcatgcgggattttcggtttttgccggttatgatgattcaattgttcaactaactggttataggctccttgtttttgttgtatgtttttttccagtccttcgatttcctgtttataatgttctaccgttagggttggaatctgtatgaggtgtctgataaattcttctgacatgtccggatgctgctggaaatacagattggcttcagagtcatttgtttttaagttttcccgggtatgctgtatggccccttgcaaaagattgatttcattgctaaaatggtgtagggcttttgttagttgcggtatttcttgtacggcatcggtttctgttccagggaacagtttctttaatgaatcggttatttcccggatggtcttgatttcgctttccagtagattttcctgctgggtgagcgtggcgaatctgttgatgttatcagtataatgtcgagctttttcttgtattttggcattcaaggtattcagatccatatcctctggattgtcctcttttttgacaagtagaaaaaattctttccggatagattgtatgtctttttcagtttgttctgccaatcctttttggtgagcatcctgcgtgttcaggcgcagaatattctcttgtagtgtctgatatgtttttcggatagagtcgatatcagttctgatttttgttaaaactgattctgcctggctgagttgttctctcttggtgttggcttctttttgaatctgctcgtctttctggttttgcagtttcaaagattccagcatattggtcaggcgactgatggcatcttcagtcttgtagtttatgccaaaagggatcgtctgttctgttgcctggagaatggctttgtctaatgtctttttcttttgtgccagcttttggatgctattggtgtaaacggtttgaagttgtacaatatttgcttgtgtctgtacgtatttttgttgtaattcgtcgtgttttttctgggcagtctcttttaggcgtttagcttcttgtacggcttctttcagtatcatttcagtatgcagtccatttacagttgagccgcaaagcggacaggtctgttctttcttgaacagcgtctgtaattctgtgatgtggtcacataaatcctgttttcccttgtattggttttccaattccaacagctcttgtttggcgatagtccattgctgttcaagttggattttatgcttttcctcggtggcaagtagagccttgtttgtttctagggtgctgttttcggaagcgtaatcttctgatttttcgaggtaattattaacggtagtaatggcttgtgctagggcattgattttttctttaccgtgactgacagtctctgccaatgtctgtaaatttaaatgtgccgtcaccagtcggagatgtgtcaccagattttcttgctgtttatatgcactttcagctttttcagtctcttggttgattctcatcgcttggtctgtcagtgcgagcagctgcttttgattggcagattggatgtctcggtatttttgtagataagcgtttttttcattcaatgttctgacatattctgcaatacggttggcagcagcatagataggtgcatggagttgttcgtcctcaatttcttttttacatgctttgatggtttctcggatttctgacagtcgtttttgtaaatcgtttaatcctgaaataaatttttgaaattcaattgcctgcgtcttcagttgttgctctttttctgatagttcttgttttattgctgccttgttttttaatatattacgaatctcggtggtattttcccatgtttggataagtctctttttttcaacagtttcttcttgacctattttttcttgtaggttctgtaattctgtgagacattgttcaatgttttttcgtttgctctcttgttctgtcagccagtgcaattgcgtttcaatgccttttgataaggccgtctgttctgtatattgttgttgaagttgttcaatctgttgtttataggttgttgtctcttcttcgctaagaagttgggcccctcgtatttcgctgttgattttttcaaattcaatgttcttggctttgctaagatcgaatatttttttaccgatgcgggcataaatttccgtaccggtaagtttttccagaatttcagccttatctttttcctcgctattcatgaatttggaaaactgaccctgtgccagcatggtggttcggcagaattgttcgaatgtcaggccgacaacctcttggatggtctgtcttatttctgcttctttttggaatgtgatatctgtttccttgcattgtaaggtgcgttttacgctttgaagagccccgtttgttttgtttctggctcttctgacgctccagacagcttcataatgtttctcgtcatttccttcgaacgtcagagaaatgaacgcttcggttgtgccgcggcgcataagttggcggggattgtttgtctgtacaccttctgcatcttcttcggcgctgccaatctgttttaaattgggagaagtattgtaaagggctaggcagatggcatttaaaatcgtagtctttccggacccggtttctccggtaatcaggaatagaggttccgatgccagtggttctttgtcaaattccaggatggcgtcttcaatagaggcgatattgtgtatggtcagtttttgtattttcatggcagctttttatgagtgttgtgtttcctcttttgctacttcttcaatagcttgtcgcattaattttgtcagctcttcattgaggtcacatccttgagtgtgtttatagtgttgggccgcaatatccagaggtggcacttctttgagttcctctacattcagggttttatatcgtccttggtccatgtcctttggctgatgtatgactttacggatttcgcaaaaccgacattgtttctcttgtgtgatagcattggcccggtgttctgcatctgccggtagaataccctcttggtctatcagtaagcgtatatatgaattgtctgtgtcatccaattgcgaaagagcttttaaggctgtttccagattttctccattctccggaatggtttttacttttcgtaaagggaggatagggatgctttcaatggttggaggtgtttggtgtgccggaatttcaatataactgaccgagtgttcataatcttcagtaaagctaagaggaatcgggcttccgctatagcgggcggattggtttgaatgattgagtgtctgtggtttgtgtatatgtcccagggccagataatcatagccgtgtcctaaagcggagagaggctcttggtccatgtctccaatcaatcgttcgtcatgccctcgcacatcactgccactgacggccagatgcgccatcatgacgatgggcaactggcttgtgttttgccgttgggcttcgtcaatcagtgtctgataaaaagattgtttgcgttgttcccgttccatcccggtttgtagtgccggataattggatgaatgaaaatagggggctgcgatgataaatccacaatctttaatctttagaacatattgtgcaggattgaatgtcccgtcttcattgcgtaggcaactcccatataggtgtaccccgaattgctgccacaattgtttggtgacttccaggcgcggaccactatcgtggttgccggcagtgacgacaattaccatctctttgcatgcatcgtggagggtgagtatggattcgacaaacagtttttgtgtcggtgctgtcggagcaacattatcaaatatatccccactgaccagcagtgcatccggttgtctgtttttgacaatatcacagagttggtctatgaagaaacgatgctcatcgttcctgtcaaaacgaaaaaaatgctggcctaagtgccagtcgctggtatgtatgattttcataagctttcgattctatatatgtcaaatcaatcctatgttcatataggattgataaagtcttatggcaggattgtctgattagtgttgaaaaaacatttcggcttccttgcgtgcgctatttgctttgacaaacttccgtccggcaatccaatagagaaggcctccgaaatgtctggcccgatgaggacaaacaacaatacagcgtccgcatgcaatgcatttgctcttgtcggttttgcgtggcgattcagcagagatagctccactggggcataagcgtacgcaagtgccgcaatgattgcatttgctgttaccttgaggcgtgagtggaatattccccggtgttttataggggcggttgccttttacagccagcggacttggcgtggtattgatagggagttcttcgagaatttttgcacttttctctgcaaaatcattgatgatttcgtggtcggctctgtccggacgtgatattccgactttagggaagatggaatgctgggcaacaaaggctcctgccgaaataggtgaaaacccgtttcctatggcaatatcctgcaattccagcaaggcatcatcatagtctcggttaccgtaaacaacgattaaaatagcaggtgtttgttcgcctgtaattttcttcaacctttcggcggccatagcaggaatacgtcctgcatataccggcattccgacaatcaacaaatcatcgggagccaactttgtcggttggtatacatcattttgtgtgaggtcatgttccgaaatgattccctgaaaatgggtggatatccctttaatgatctggcgggtagtataggttgcactgaaataggctacatgtatgttttttattttcatggtagtgtgctattcgttgaaactaaatttgattcgattgataattgaacgtccgagggtcagttcgtcggtatattccaaatcattaccaatggaaatacccttggcaatagtgctgataaccagattctctttgttcttcaatttcttgaagatgaaatatccggtagtgtctccttcgatagtagcgctgagtgcaaagataatttcacgtatatttccctgttctacacggtttattaacgaagtaatgttcaaatcagatggtccgataccgtccatgggtgatatgatgcctcctaacacatggtagagtccgttatattgagaagttccttcaatagagaggatatctttgatattctcaacgacacagatggtggacgtatctctttttttatctgcacagatttcgcacaactcgctatctgcgatattgtggcacactttacattcccgtatatttgttttcagattcgtgatgctttgtacgaaagaggcaacttcttccggtttgcgttttaataaatgcaatacaaatttaagagcagtttttcgtcctacgccaggaagtgaggcaaactgttcaacggctttgtctaatagtttggaagagttcatacaccttaattttcgtcatcttgaaagtgaaggtctttgagcatcatttgtatatcattctttcccatgaattcattctcctgcaaagtatagcagatgtcaaagaaatgtcctgtattgattttgtcatacaagtttcccattccgaaaccaatgccgctccggtcgttgcagacacgggtatcgtcaaccaccacgagtttcaagtgttcgttattacgtcccacgcggcgggtaccaatgaaattaattacattttctgttacaaaaacaggaattgtgttgtttggaccgaatggagcgaatttttggagcatgtggtagaattccggagtgatatcactcagtttcaattgagcgtcgatgttgatttgtggagtcagcatctcgtcattgatggtttcacacacaatctgttcaaatttctccttgaacggttcaagattttccaactttaaggtcagaccggcagcatatttgtgtccgccgtagttttccaggtattcgctgcattgcgaaatggcataatacaagtcaaatccttcgacagagcgggcagaaccggttgccagtccgttggattctgtcaggatgatggtcgggcgatagaacgattctgtcaaacgcgaagcgacaattccgatgacacctttgtgccaattggagttgaacaataccgttgttttcttagaaggttcaatgtccgaatgcttgatatgccgtattgcttcttccgtaatgttgtggtccagttttttgcgttggtcgttgaaggtatcaatatccagtgcaatatcctctgctgttgattcagaatcagccgtcagcagctcaacggatttgcgtcctgattctactcgtccggcagcattgatgcggggaccgatacggaaaacaatatcgttgatcgaaatctctttatcgataccggcaacttttatgatggtcttaagtccgagacttggttgtgtattcaactgttgcagcccgtaataggccagaatgcggttttctccggtgatggggacgatatcgctcgcaatacttacacagagtaaatccagcagtttgtaaagctccgacatcgggagattgtgtttcagactatgtgcctgtaccagtttgaaactcactccgcagccgcttagccatttgtatggatattcgcagtctttgcgttgcgggtcaagcacggcaattgcttccggaagcgaatctccgggagtatggtggtcgcaaatgataatgtcaaccttcttggaatttgcatactttactttttcaactgctttgataccgcaatcggtaatcagcataagcgaaaaattgttttcagcagcgtaatcgattcctttgatagagacaccatatccttccgtataacggtctggaatgtaatactctaaattttctgtgttgcaacggttttttaagtatttgtataataaagcaacggctgttgtgccatctacgtcatagtctccgtaaatcagaattttctcgtcagcggcaattgccctgtccaagcgttccactgccttatccatgtccttcattagaaaaggatcgtggagcatattgagtgaaggattaaaaaatgcttgtgcttgctcaacactttcaatgccccgttgcagcaaaagattcgctataactgggtggcaatttattttttttgcaagttcttgtatcttagtttcctccggcggagtgtttatgacccatcgctttttcattatacttttttctattctgctacaaagtagcggaaattcctgcttatttcaaagcgttatttggaataatttcatataattgttttgattttttttgcaattcaaataaagcactctgatacatgcgattaataaattgtcttatggatatggattttctctgtcttgggcataacagtatcaagtctatgtcaaatccatgtcacatccatgtcgaatgctacatgaatcctatatgaatgctatataaatgctatgtatatagctttcatatagctttgttataaggtgtctataatctattacatggatgtgttatagatttgttttagagatgagatggcagtggggagggtataggagttggtgctatgttggcgacatattgttttggtcggaataagaataggatatgacaaatgaattggcaaacgtgcctatttctgcgatttgctttgagttgcttacatgacctctcgtcttggtgcagaggtagttcttttttataaaatagcaagtagaatcgcttgggattttagtcctaactcaacgatttcttcagattgacactacaaaaccttcagtttactttagtgagtgaaaagaaatcactatatttgcacataaacaataaaatacatcaatttgtatatatgaaggaacaaacatgcgaccattttcatatatcgaattatttaaaaagctcatagcaaaggagagtattgaatccgatttctcggagcaaattaacgatgaagaaaagaaacaaattgagggattgcttttagaaatcaaaaatatagttaatccaacggattctgactctattccaaatctttttcaatagtattaagataattgacagacaaaaatatgacagagcaagaattacttcaaatgcgcgatttggcagaagccggaaaagtgcaatttaaggagcgggcgaatgaccgctatgatatcggctgcgaaatggtggcgttcagcaactctcacggcggacagcttgttatcggcattaatgacaagtcgggagcgattaatgcactgtcgtatgtggaattgcaagagactacgaatctactgacaagtatcgcatcggagaatgtgattcctaacgtgcttatagatgttgagaacgtgcctgtcactggcggtgccgtagttattgctactattcccgaaggaaagaataagccataccatgacaataagggcgtgatatgggtgaagagtggcgcagacaagcgtaaggtgtttgacaattccgaacttgccgagatgatgagtgagtgcggcaatttcgacccggacgaagttgctgtgcaaaatgccacgcttgaagaccttgatgccgataccatcaaactgtatctcatgaatcgtttcgcaccggtattcaaaggcaaggccattgacgagttgaatatgaaagactattcacttgatgatatggcagagttcgttatcaaaggaactacgattgagaaactgcttcgtaatctccggtttattcgtcccgatggaaagctgactgtcgctgcgatgttgctcttcggcaaatatacccagcgttggcttcctgtgatgacggcaaagtgtatcagttacataggcaattcaattggtggaacacagttccgtgacaagatgcacgacatggaaattgaggggaatctgctccaccagttccgcaccatcatgaatttctttacccgcaatcttcggaaggtgcaggttgaaaaggagtttaattctttaggcgagttggaaataccatacgagagtctgaccgagtatgtggtaaatgcgcttgtgcatcgctcgctgaatatcaaagccccaatccgtattttcatattcgacaaccgcgtggagattcacagccccggatcactgcccaatggactgacggtggaagacatgaagaacggaacatccatgccacgcaatatgttcctgttcaccaatgctaactatctgctgccctatacaggcgcaggtagtggaatccgccgtgcgcttgaatacagtcctaatgccatcttctccaatggcatcagcgacagcagtgaaataacccatgccgctaatgagttcgtcataaccattccccgcaccggaaaccaacctcattcagaaagtgagcaacctgccgaccaagttactcacaaaataaacatcgcctccccggaaagtgagcaacctaccaatcaggttactcataaaatagtctcaatctcctcagaaagtgtgcaacctcacataaaattatctcaaaagcaaaaagatattcgaaatttctgttcagtgccccgtacagctaaggagataatggataggcttggattaactgatttctataataatcgcaagcgttatatttatgaccttgtagaagcaggaatccttgaacgcactgtacctgaaaagcccaatgaccccaatcaaaaataccgtcgcaaaaaataatattgagtaggagctatctgacttgtctataagttagcagataactcctttctctttgtacccttctaattagtgtttccattaataagttctatgaaatattcggttgatttagataagaaatgacataaatatgaaagaaattaatccatatgagacaaccagaggacgtcagttcgagatttggaaaaatgctcccaatcctatgcttacttttgtcaagaaaatagatgtgacacgccttgttaggataagtaaaaaaaagcatttgaagttcaatatgctgtttgactactgcattggaaaggcagctcttcagcaaaaggaattttatcttttgccagtgggagataagctaatgcaattcgataaaatagccattaatacaatggtgaaaaatcgaatgggagaagtcagttcttgtgatattgaatttcagggggattttgagagttattgtcgcgactatatgaagtatacggcagaagtcgcaatgagttgtgctgaccgggatttatctgaagagtgtatggttatcggaacttctgcggttattgatacggaattagaatttgctggcggtatgtatagtggcatattcaacaatcctttcattatttggggacggtattcgcgtcattttttcaggtattatattaatttgtcttttcagttccatcatacacaaatggatggtgctcatgccggttcgtttttaaacaggatacagatggagattaataaaatgtaattcataatcagtataatgaagaagtacagaggttatatatcggttgttttaatacttgttctgttttgctctttggttttgtttcgggatattttgattcgctatgcctcccgaaatatgacagacaggatggaacagtcggaaaagaatgcagtggaggactctttgtctgcactatatgattataacacgaataagaaaagctatgaatatacgtttcttgaatttggttcggtcggctgtcattcttgtcgccagatggaggatgttatggagaccatcaaacaggaatacggtagtcgggtgaatgtgatgtttatcaatgtaagtctgaagaagaacagggattttgttgattatttcggaatagcaacgatacctacacaggttttgcttgacaagaatggcaaggagtttttcagacatagcggattcctctcgacagaggacctgtcaaagcattttgttgaaagatgaagatgcactgacaacgatttctcaaaatggcagtgtgttttgctcgaatgtgtgtatttttactcaatattgcaccgatgttgtataatcctgggaaaccaggtcggatactattgtcttttttctgattttcttgtaactttgcctgcttaaaaagcagatgccgtggtgacggcagacaaaccaataatttaaaatgaattaaagatgagctttactgagttaagtgaacaagagattatccgcagaaattctttgaaggaattggataaacttggaatagaagcctatccggcagcagagtttaaagtggatgcccatgcggcggaaattaaagaacaattcaacgaagaggcagagccccgtcaggtggtgattgcaggacgtatgatgacacgccggattatgggtaaagcttcattctttgaattgcaggatgcaacaggacgtattcaggtgtacgtaagtcgcgatgatatttccaatgatgaagcttctacagcgtataatgttgtgttcaagaagttgatggatatcggggatatcgtcggtgtaaaaggatttgtgttccgtacgcagaccggagagatttccgtgcatgccaaagaattggtgatgctttccaagtctctgcgtccgcttccgattgtcaaggagaaagacggcaaggtgtttgatgcttttaccgacccggaacagcgttaccgtcagcgttatctcgacctgattgtaaatcctcaggtgaaagatgtgtttgtgaaacgtaccaagatgataaacgccatccgtgagttctttaattccaaaggttatctggaagtggagactcccgtattgcaggcaatccccggtggtgcttctgcgcgtccgtttatcactcaccataatgcgttggatattcctttgtatcttcgtattgccaacgagctttatttgaaacgtttgattgtcggaggttttgaaggggtatatgaattttcaagaaatttccgtaacgaaggtatggaccgtacgcacaatccggaatttacctgtatggaaatatatgtggcttacaaggattatttgtggatgatgaatttcaccgaggagatgatcgaaagagcagcccttgccattaacggtacgacaaaagctgttatcggtgataatgaaatcgactttaaacgtcctttccatcgggtacgtatggctgatgccattaaggagtttaccggttatgacattgaaaaaatgtctgaagaagaattgtatgacgcttgtgtgaagttggatattccggtggacaagactatgggtaaaggcaagttgattgatgaaatctttggcgaaaaatgtgaaggtcattatatccagccgacctttatttatgactatccgaaagaaatgtctccgctgacgaagaaacatcgcgaaaatccggatcttaccgaacgctttgagttgttcgttaacggtaaggaagtggcaaatgcctattctgagttgaacgacccgattgaccagttggagcgcttccaggagcagctgaagttgcaggagcgtggtgacgatgaggcgatgtatattgattacgactttgttcgtgctttggaatacggtatgcctcctacttccggtatgggtattggaatagaccgtctttgtatgttcttgactaacagtgcatctattcaggatgtgttgttcttcccgcagatgaagcctgaaaagaaaccggtggttgacccggatgagaaatatgaggctttgggaattccaaaagattggattgctgttgtgaagaaagcaggttatcagacggttgaatcattgaaagctgttgagaatccgaataagctccatcaggaattgtgtggaatcaataaaaaagaaaaattaggattgtccggtctgactccagatgacgtgaagtcttggctggcttaaaaataggttgccgggggacaaacccggcaattttttatattgcaacttactaacttatttgtacatggaaattccagaatcgccccgtattgccgtagtaggtggtggcagttgggcaacggctattgctaaaattttgacggaaaccaatgatcacatcaattggtttatgcggaatatagagtcgattaatgctttcaaggagttgaagcataatccacgctatttgtgtgctgtggattttgacctttcgaaaatcacctttacagataatctggattatctgattgcccattctgatattataatatttgcaatccccagcgcttttataaaaaatgtagtggccaaagcctcccgcccgctgaaggataagattgtggtgtcggctatcaaagggcttattccggatgataatctgattatcggtgaattttttcatcagcaatatgaggtgccttttgaacagattgtcgtgatttccggaccttgccatgcggaagagattgctttggagcgtttgtcttatctgaccttctccagtgcagatgcgaaggtggcccgttttgtatcgcaattgtttaattgccattatgtcaagacctctatttccgatgacatatatggtacggaatacgctgctgtaatgaaaaatatttttgctattgcagcgggaatctgtcatggcctgcgttatggggataattttcaggcggtgttggtttccaatgcgattcaggaaatcgagcgttttgtcgctgccgtgcatcccatccagcgtgatatcaagtgttcggcctatttgggcgacctgcttgtgacagcctattcacagtttagtcgcaaccggacgtttggtacgatgatcggtaagggatattcggtgaaatcggctcagatggagatgttgatgatagcggaaggttattttgccgtcaagggaattatggaaatcaatgagaaatataaagtgcatatgccgattacgacggctgtgtataatatactttatgaacgtatcagtccttcgttggagatccgtttgctgacggaggaattgagataaatagatgtttatgtattctttagtagaagtaaaagataaaattgcagaaagggagttcattgaattgccggtgcgtctgtatcgaggtaatccgtattgggtgcgtcctttggataatgacatccgcaatgtatttaatccggagaagaatccgagtttcaaacatggtgagtgtacccgttggattttgcgtgatgaaaaaggggagtgcgtggggcgtgtagctgcttttattaaccgtaagacttgtaatttggataaatatacagtcgggcagatgggcttttttgagtgtatcgacaataaagaagctgcttttatgctgttcgaccgttgccgtgagtggttggaaagtcgtggaatggaagccatggagggaccggtgaattttggtgaacgtatagaatggtggggattgcttgtggatggatttgaccagtcgcctgtttatgccatgccttatacgcagccgtattatgtgaaattctttgaggagtatggtttccttgattttttcaagcagtttacctatcgtacacgtttggtgatggagagcctttcgaaaatagtggtttggaaggccgatcgtattttgaagaatccggattatacggtgcatacttatggagatatcggtaaggagcgggctattgaggcattattgacagtatataacaaggcgtggaatctggaggtgcatggggtagatgggattacgcgtgatcaggtggaatccatttataagagtctgcaaccgattatcgataaggatttgatatattttgccttttataaaaacgagccgataggcttctttttgatgttcccggagatcaatcaggctgtgaagcatctgaatggcaagatgaatttgttgggaatcttgaaatttatgtattatcgccatgtcaagaagattgatgtagctctgggacaacttttcggcgtagttcccgaatttcagggcaaaggagtggaagctgccatgatcaagcattttacggaatgtatcgttgagcaggacagtaattataaatatctggagttgaactgggtgggagaatttaatccgcctatgattcacttgatggagtatatcggtgcatctgtagcacggacacatatcacttaccgcaagctcttccgggacgatattgaatttgtccgttcggtggacaagatgaaagaatagaataaagaaagccggtcatgttatcatgtccggttttttttgtatttatgttgtttaatagtaaaaaataaaaaagtgtatcacatttgtgatacacttttttttgagcggaaaacgggactcaaacccgcgacccccagcttggaaggctagtgctctatcgactgagctatttccgcaatttggtgagtgggcagtgatggattcgaaccaccgaaggctacgccagctgagttacagtcagccccatttggccactctggtaactgcccatgctctaaagaactcgtttatttcttttttgcgagtgcaaagatagagctttttctttacactgcaaattttttgagataaaaattaatttaccacattggtcggactgcgattgaagaagttgcggatgtttgtaagtgcttcttctgccatggcaatacgggtgtcaatggtgccggttccgatatgcggagtcagtacaacattgtcaaagccgtaaagcgcttcggtgatatgaggctcgtcttcaaatacatccaatgcagctcctgcgatgacatggctccttaaggcttcgactaacgctttttcgttgatgactgcaccgcgggctgtgtttactagtattgcagtaggtttcatcagactgaattcgcgaatgtcaataagatggcgtgtctctgctgttaacggagtgtgtagtgtgatgaaatccgatattcgcagcagggtttctaggtctgtacgctggtaaccggcaacttctgtacggcggttgtagtaaataacgttcatcccgaatgcttcagctttgcgggctacattgcgaccgatgttgcccatgcctatgattcctagtgttttgccatcaagactgaaacctagatttttcatggttccccacatggattctttttctttgcggatgcgaagattgcattcagatactcgccgggctgcgcttagcattaaagccatggcaagttctgctgtgggattgttgactgaatgaggagtgttggttacggctatccctttttctcgggcatactgtacatcaatattgttgtagccaactccataattactgattagtttcagcttgcttcctgcatctatgatttccttgtcgaccaaatcatgactgtgaaatatggataatagtacatcgtattctggcaatagccgcaggatttcctctctggacatctgttcgtttaacggaaatgtgatttcccaatctgatggaagattctcaaatgggagacgaggtagattataggtgacaagtattttcatgatgtgtgatttatggtgttgttatgtgttgctgtatttgctttaatctaatgttgtgcgagcaaacggggctgcatccaagccgatgaattgtccggctaggtatttgtagtaaccggtgacggcaaccatgccggcattgtcaacagagaagccgagacgcggaatataaatatcccatccggaacgggctgcttcatcgtgtacggctttttgtagggccgagttggcagatactcctccgccgatagctatctgtttgattcctgtctgtttggcagctttcttcagtttgctcatgaggatatctatgacagtcttttgcagtgaggcgcaaaggtcgttgagattttcttgaatgaagttagggtttttctttaattcatcccgtaggaagtaaagaaatgaggtttttaaaccactaaaactgtaatccaagcccggaatttgtggtttgttgaatgagaatcgttccggatttccttctttggccagacggtcgatgaccggaccgccgggatagggaagacccatgactttggcgcatttgtcaaacgcttctccggctgcatcgtcaatggtctgacctatcatttccatatcaagatagtcgcgtacaatgatgagctgtgagtttcctcccgataccaataatgttaggaacggaaaggatggatgacgactttctacgccaggttctttgatgaagttggctaatatatgggcctgtaggtgattgacttcaatcatgggaagtttattggcaattgcaaaacctttggcaaaggaggtgcctaccaatagagagcccaatagcccggggccacgcgtgaatgcgatggcattgatatcttttatttcaataccggcctgacggattgcttcgtgtacgacagggatgatgttttgctggtgtgcccgtgaggctaattccggaacaactcctccatatgcttcgtgaactttctgactggctattacattggaaagtaccacaccatcttgtaaaacggctgcggaagtatcgtcgcaagaggattctatgcctaaaattacagtcatgactttaattcaaaatgtaaaagtaaattagctgatttcttttcaaatatcctgcaatattaatatttttgtctgcaaactgaaaattacaaggtatataaaaaagattcttcagatattattctatttgataggaggatttctattgctgctgggggtaacttacgccctgttgttgtctccgtctgtccagactgttttggtgaaatatgttacagatagaattgagagggtgaccggggtacaggtgcagattggtggtgtggatttccgcccaatcaattcattggtgctgaatgatgtgttggtccgtgattttagaaatgataccttgctgtattgccgtgatttgcgtgtgaaagccgattctttgagttttgcgaatcggatgtttaatgtgcgggaggtggtgcttgacggtgcaacgtttaatctgtgggtgcaggatagtactaattataccaatatcgagatattgcttgattctttggctaagggaagtggggcagcacaagaggtgacgggaagtaaaaaagaacaggaggattggtggttcagtttacggaaaataagtttgagaaattcgcgttttacctatcgagaggaaatttatgaacctatagaatatggggtgaactggaccgatgtggattgtcgggatttgaatgtggatattacggagttgaattttatggaaagcccgatgcgtatgacggtgtcggatttgaattttgtagagaagtcgggcttgcaaattagggatatggggggtaaggtgcgggcgggagcttctgatttgctgattacagattgccacatcgggatggagcgaagtgatgtcgatctgatgaaattggaatatcattggactccgaatcagcatgattggaaatattttacaacgcggatgcagcagtattatgagctgggaccttcatcagtcagttttattgatttggcttattttaatgaaatattgcggggcattacaaatacggtgaaattcagtggggtggtttctaatacaatagagcagttggaaggaagggatttgtattttgagttgggagaacacagcgtgtttcaggggagttttaaatcggtaggattgccggatgtatggaatacggtttttaatataaaactgcaaaaggctcattttgctccagcggatttggcaacagtttatttgccttggtttgagatgaatatacccgttccttcatttctttatcgtgttccgtttgtggatttcagcagtattcgatttgatggtttgttgtcggattttatagtgcatgcaaaaagcgatactccggagttggcaggggaaatgacttttatttatggaatgtgtggtgaggatgtggaggattgtgctgatatgcggggtgattttcagtttgaaaaagtggattttggtagatttgcaggtgtgaatcagttgggaaatggtgcatttcaaggcgaatatcatggagtgtgggcaggtgaagatttgtcttttaatgtaaaatcaaccctgccttggttgcgggttaataagggatatgtcagggatatcgacttggcaatggtttgggaagatgatcgattggatttgatgacttccttggaggataagaatgtgagtggagggatggtaggatcttatgagacaagtgattcattgcaatttgccagtttaaaaggtaaattgaaaatcgataatcttgattatttgggttggggattgaaggatggaaaagagagtatagcttcagaattcgatttgatatatacaggtggcggaaagagtggatttaccaatctgcttttgtcaaatgtcgggtatgagacagaaaacggaggttttgagatagaggatgtttattttgaagaccgtagaaatgggaagtataacgtatcctcactttcttctgatgttgttgacgtggctgtagaaggtaattatcaggatgttaatccgatgcttttcgtaaagggttttatagagaattatttacctgcatattctatggggcagagaagtcattctttacgtggacgtaagtatttggagcagtttgattttagttatgaagtaaatataaaggatgctaatcgggtgttgagggttttagctcctgattatcgaatagcttccggtgcaaaaattgtgtctggctttagcacggaaaataatcggatgaatttacattttcaggctgattcaatcggttataaaacggttgatatgattaagcctgagttgtcaatgtctggtgagcccaaacgtctgtttatgaggatggatgctgataagtttgtatatggggatgactatcagttatgtaatgtacggaatgatttagttatggttgaaaaccatttggataatcggttaagctggtgtaattgggaggaaagaacttatagtggttcgttggcagcttgtgtggtgtttcaaccggagtatttggaaggatttcccactaaaatcttgcttcaacgcggtgtgattgttatggatgacagtgtatggcatgttgagccatcaacggtttttgtgaaaggaaaagaggttgagataaagaatttttctgttcgtcatggtgatgaatcatttacagttttcggtaaagtctctgaaaatccgtatgagacattaactgttcagctggaaaatttcaatttagggtatttggcacgagtggctttgaaaaagaatatgaaattgtttggggtgactaccggttcgttgactttgaaagattattatcatgattgtttgttattgtcagattttaatgtgaatgattggggaatagatagagatacgttgggttctttacaatttcattcttattgggatgcggataatcgaaacttgattgtcggtgcagagaataagattaaaggtaaggtagctttaactatggacggagcatataatcctcgtacagattcaattaatattagtatgctgatggaaaagatgcagttggaacgttttagttcgtatgttgcagataaggtgtctgatgtaaagggagcgttgtcaggtaatttggtattaaaaggcacgacgaaacagccggatatttcaggtgtgattattttggattcggtagggatgaatgtgaatgcactgaatactcattttaatgttaatgatacggtatgggtgatgggagatcagttgaattttatggattttacggtatatgatgcggagagacataaaatgctggtaaatgggagttatcgtttttgggaggatagatatgatataaaagcttcgtttaataacatgcggatgttggatacaaagtctacgagagatgagatgttttatggtcaggtaaatttaagtggaatagctgccgttgataataagaatggagtgatgaatgtgacaatcaatgcccgtacggaaccgaagtctcaatttaatgttccattgacttctgcaattactgaacaatcgaataattttcttcattttatacaacccggtaattcagtagcgaaaaatgagcaattgctaatccaaccgaccgatattaacttgaatgttaatttagagttgaatgataatttggatgtccaggtgatatttgacccagcagtgggtgatattttaaagacctcgggaaacggcaatatcaagttgacatttgataaagatggtagtttgagcatgtttggagagtatggtattactcaaggagactatctttttacgttgagcaatttggtcaataaacgttttgttcttactccggggggaacgatcacttggaatggctcgccttatgatgcaatgttagatatcagtgctgtatataatttgaaaacaacgatcagcgaattgttgccagtggatgtaggggcgtcggaaggttccgatggagaagaggtcgtttcggagagcggtagaaaagttccggtggaatgtgtgttgaatttgagtgataatctgcgcaatccttctgtgaaatttgatataaatttcccgtctttggaatctcagagtaagagctatatacaaagtctgttttcaagtcaggatgaggtaaataaacagatgttctctttgttggtgctgaataggttttatcggagtgataataccggagattatggaacgcaggctcagacagcaggagtgacaaccgtgacagaaatgatgtctaatcaattatccaattggttgtctcaaatcagtaataatgtagatataggggttgcttatcgtatgggagatcccaatcgagaagtcagctcggatgaaattgaattggctctttccactcagttgctaaatgaccgggttacaatttcagcaaatggaaatatggatgtgggaaacactcgtaatgggacggatagtgaccgtaaaacaaatattgctggagattttgatgtggaggtaaagcttaaccggcaaggaacattgaaaatgaaagcctattcacacacgaatgagaaaatcctttataataatactgaaatgattcaaggggtaggtatttcgtatcaggaaacatttgatactttgcgtgaattattacgtaagtactttggttttttgcgtagaaaaaaataatatcttcttttctattcggatatgattgaacttgtttggtttggacccttatattttttgatttttatttatttgagaggatgttttagtatttttgcaaattgaggataagtagggaggggtcaaggataattttaaatggaaggtaatgaagcataattggaagccaggaacgatgatttatccgttgcctgcagtattggtgagttgtggaagtactcctgaagagtataaccttttgacagtagcatggaccgggacaatttgtaccgacccggcgatgtgttatatctcggttcgtccagagcgtcattcatatgatattatcaagaagaatatggagtttgtcattaatttaacgacagaggaattggcttttgctacagattggtgtggtgtgcgttccgggagagattaccgtaagtttgaagaaatgaaacttactcctgggcaggcaaccgtggtaaaagctccgattgttgaggaagctccgatttctatagaatgccgtgttaaggaaatcgttcatttaggatcgcatgatatgtttgttgctgaggttgtgaatgttttagctgatgaccattatctgaatcctaagactgaaaagtttgagttggaccgggccaaacctttggtgtatgctcatggcgaatattttggtttaggtcgcaaagtcgggaaattcggttggtctgttcaaaagaagaaaaagaaataatgaatctaactttaataaaatcatggtgaaaattttttttcaatttttatggttgtcgctatttgttgtgctgatagcggcatgtgggaataattctggttttgaatatgaaacagttcccaatgatccgatgaatgcgcgtatttatacgcttgaaaatggattgaaagtatacatgactgtaaataaagagcagccacgtatacaaacatttattgcagtacgtgccggaggaaaaaatgacccggcagaaacaaccggtttggctcattatttcgagcatttgatgtttaaaggtacagagagtttcggtactcaaaattatgcaaaggaaaagccgatgttggatgaaatagaagcgttgtttgaagtttatcgtaagaccactgatgaagcagagcgcacagctatctatcacaaaatcgatagtgtctcttatgaggcttcaaaagtggcaatccctaatgaatatgataaattgatggctgctattggcgctgtggggacaaatgcttatacagcaaatgatatgacggtgtatgtagaagatattccatctaaccagattgagaattgggcaaaaattcaagctgacagatttcaacattctgtgattcgcggatttcatacagaactggaaactgtgtatgaagagaagaatatgtctttgacaaaagacgatagaaaggtgttcgaacagatgatggctgctcttttccctcatcatccttatggtacacaaactgttttaggaacacaggagaacttgaagaatccttccattacgaatataaaaaacttctttaaagaatggtatgtgcctaataatatggctatttgcttgtcaggtgattttgacccggaaatgatgattgaaacaataaatcgttatttcggaggtatgcagcctaatcctaatttgcctaaattgaaatttgaagctgaaaaaccgattgaggctcctattgtaaaagaagttgtaggtgctgaggcagagttcttggtattaggttggagattccccggagcggcaagtaaagaggcagaaatgttgaatttgctgagttctattttatataacggacaagcaggtttgattgatttggatattaatcaggaacagaagatgttgaatgcagcttcttatcctattttatttgctgattactcaatgtatcttatgcagggaaatccgaaggccggacaatcgttggaagaggtgcgtgatttattgttggctgaggtggaaaaattgaagaaaggtgagtttgatgaggctctgttggctgctactgttaataatttgaagaaaggtatccaagaaagtctggaaagtaacgaagatagagcagactggtttgtgcagtcgttcattaatggctcaaattgggctgatgaggtgagtgctattgatcgtttgagtaaagtgactaaacaggaattggttgattttgcaaatacttattttaaagataactatgctgtgatttataaacggatgggtcaagataataatgcgaagacaatcagcaagccttctattactcctattgttatgaatcgtgatgtggccagtgattttctgaaagaaatacagggtgcggcagttaaacctatagagccggtatttgtggatttttcaagagatattgagaaaggtagtgccaaatcaaatattccggtattgtataagaaaaacacaacgaatgatttgtttgtattgacttatgtgattgaaaaaggtaataatgaagaccgtaatttaagtacagctgtacagtatttggattacctgggaacatctactttatctcctgtggaagtgaaacagcagttctatgaattggcttgtaattttgttgtaagaccggcttcggaacgtacgtttataactattagcggtttagctgaaaatatgggtaaagcgatggagttgtttgaatctctgttagcagatgcacaagcaaatccgcaggttctagaatttatgaaagctgatttgttaaaaattcgggaagacaagaagttgaatcagcaggctaattttacaatgctgttgcagtatggtttatatggaccaaaatctccagcaacaaatgttttgtccgaagcagaattaaaaggattgaagtcggaaactttattgtcatgtttgcgtgaattgaataccattgagcattctgtaatgtattatggaccggcaacaaaagaattagtgattgaagaggtgaacaagcaccatcgagtacctgcgacattgacaaaagttgataagaataataaattcacattccaggaaactccgaaaaatcaagtgattattgctccgtatgatgctgctcaggtgtatatggcagcaatttccaatcggggcgaaaaattcgatttgtccgtttatccggtgatgacactatataatgaatattttggtggaggaatgaattctatcgtgtttcaggaaatgcgtgaatccaggagtttggcatacactgccggagccagtatgaatgaaccgggccgtttggatcagccatatttttataatacattcattgcaacacaaaatgacaaaatgggggatgccttgaatgcctttgacgagattataaataatatgccggaatctgaagctgcctttaatttggctaaagaggccttgttggcacgtctgagaacagatagaattattggtgccgctgttttcaacagttatctggaggctcaggatttaggattggatatagaccgtcgcaaagtattgtttgatgacgttcagaagcttaccttgtctgatgtgaaggatttccaacagaaatgggtaaagggacgtacctatacttattgtgtattaggaaatgaaaaagctatagatatgtcgaaactttctgctcgtggtcccgtaacacgtgtgacaacggaacagatttttggttactaagaatgaagggcagtttggttttatttaaaaccaaactgctatttaataattaagctggattggttatgaagtttaatatgatattgagctgttttgtggctatacttgcattagtgaatcctatacagaaagtattgattgtatcgtcactgcaagaacgtttctctcctgcagaattaagatatatatcgttgaaatctacttttactgcaatgttgattttaatcttttttctttatttaggacaggttactttcagctatgtttttcgcgtagagctttattcttttcaaattacttgtggggcagtattgatgtataacggactttccggattgctgaaaggtttttttatgaaagtggacgagcatattaaaattgcagatttgacaactgttccgatagccattccgatgattgcaggacctgcaactattacagcagccgtgacttttccggttcaatatggacgttttatcaccattgttgcaattttgttggcattgcttgtgaatctgatttttatgttggaagctcgaaaaatcggaaattttttgattaagtataattttatgaatccactgattcgtattatcggattgattgtagctaccattggtttgcagatggtttttgatggaatcactttgtttattaaaacactgtcttgaattttcatctgataatcatgtggtttcggtagtttggcaagaggtaaggcgataaaagaaatggtgattttcaaaaatcggttcaatcagttggaatcgtataaatttggcaagagtcgtttctgcttttgcacgggaaatccgtgctattttacaatatttgtttagggatatcgattggttttgtgacagataatccatcaatatttgttcttgttgggtataatgtacaaatgcaccttgtggtttggcttcttgttgccagatctttagatgtacgggagttgctaaaatattttcatctttgatacgtatataggcccatttcttattattgtgatcagtagcgtaatatggtttgtgcattcctggttgaatgatgacttctaatacagtgcgtccttccacttggtgggtaatcatcttacattctactgcaggatggcaataaagttttgcagcagcatctatcatataaatctcttcttctgagcggacgccggcgatacggccgttgtctttgacaccaacaagcagacgtcctccatctgtatttgaaaaggcggaaagtgttttcgctatttttcgtgcgtctgaaatttcaaatttaaagtcttgttgctggtgttccccttgtgctatcaagtcgaatatatagtgattcatttctctgctctactttctctgttaattttgcggttgcaagtatactaaagataaattgcattcggttttgtatgggagatttttattttccttatacacgattcttttatttaactgaaaaatagtggcattttatcctccattgcgctttctttgtgccctcttatctccctctcaaatatatgacatctatatatcaaagataacacaactataagataaatataataacttgttatctttgtcttatagttgtattatatttaagttgaaaatatatgggatttcccaatattcatttgtttaaatgaaagcatcgagattaaatggggttatttgtttcttttaatccaatctattcgtatttttgccaatcactaaattttatccctaatttcgtatctatgggatattgaataagataaatggatcaagatagagagtcaatatcattgggcagtaaagtagcttttgaacagatgttccgaagtaattatacacgtttgtgtatttatgcagaatcgctgttgcatgatagggaggttgttgaggatttggttcaaggggttttttgtgagttgtgggaaaaaagagataaactgaaaattcatgattcgttaaatgcttatctttatcgggcagtttataatgcagctttgaatgttctcaaacatgaaaaagtgaaactaggttttattgagtttgtcaataagcatggtatcaaaggagaaaataatatcgaacatttttttgacagagaagagcaaggatatctactggaagaaattaatagagccattgatactcttcctgaacaatgtcgtgaaatttttttgcttagtcgttttggtggtaagaagagtgtcgatatagctcgttcattaaatatatctgttcgtacagtggaaacacaactttatcgtgcgatgaagcatttacgttcagaacttgcacatctgcgtaatgcagatattttgctattctttttgtgggatcgcgtaaaataattgtttgcagcttttctttggcattcagcagtttgtttcttttgagttgtatcttaaatgttaaaatcgttttttttcaaaaaatgtgtaagtagtttgtaatggtagtttgtcttatattaaaacgagagtaaaatatatgtgagaactactatgaccgatgaaatacaacatataataattgcttctttggaagggagtgcaacagataatgaattggtccgtttgcattgttggttggaagagtctgccgaaaatatagctttgtatgaagatttttgtaaactgtggaggcaggcgggcaaggatgcgcgctacgatgttgatagaggttggatgcaaataggattacgtttgaagaaaaacgtttttagacatcgtaaacgtttgctggtgcattggatggaagcggcagctgtaatcacgttttttattgccggaggtatatggtattggggagatccttcattcgataatgtagaaggtcaaattgcggttagccaaattgagcctggcagtaaaaaagcaatactttatttaggagaaaatcgtcaggttgaattgaacgaggggcgacaagatactattttatatgagaatacagcttttaagcaggagggtaatactttagtatataatggtaaaaatcaaaatgcagaaatagaagagtataatcgtttggttactcctcggggaggcgaatattctgtagtattgtcagatggtacaaaagtatggttaaatgcagagtctgaattgaaatatccggtgcatttcaaaggaccggagcgtaaggtttatttaaaaggagaggcatattttgatgtagcaaagtgcaaaggacaaaagtttgtagtttgttctgataaaacacaaattacagttttagggacggagtttaatataaagaattatgaaggaggagtagttgcagcgacgttggttgcaggaagtgtattggtgggttacgaggataatgaatgtcgtttgaaacctggtcaacaagctgtggttagtgttgatggagtgaatgttagagaggtggaaaccatcctttatatagcgtggaaagatggattttttgtttaccaagatatgacactagaccagattttgcaagagttgtctcgttggtatgattttacttatttctatcaaaacgaagaattaggagcattgcgtttgacagcaaaacttagaaaatttgatagtgttgaagatatttttgaaatactaaaaacgacagggagacttgattttgtggtgaaagggaagacggttactgttatgaaaaaatagtttatttatatatacaaaccaaattttgaatttatgaaaaagaaatgtaagggtagagattatccaagaaaaaaaggggaaagtctttggcttgttgccagactctcttttattctaatgtttttttgcttgcagattcaggcaaatggcttttcacagcagactcgtgtgagtttgaaattgggacatgtcagtgtcaagcagctttttattgaaatagaaaaagcaactgatttggctttcgtttacaattcaaccgatgtggagaaaataggaactgtcgaggtggattttacgaatgaagaggtaagcaagattttggattattgtctgaacggtacgggatttacttatagttttgtgaataatcatatcgtaatcaagaaagcagaaaaactgattcagcaacaaccagaggaaaggatcattacaggaaaggttatggataagaaaaccggtgcgcctttgcctggtgcgaccattaagattaaaggaactaccatcggtaccgcgagtgatattgatggtaaatttgaacttactattgccggtaatgttgcagcattagaagtgtcatttatcggttatgaaaatatggaggttgctgtaggtaagaaagagtatgtggaggtgttgatggttgcatctaatgctgaaatggaagaggttgtagtgaccggaatttttactagaaaggcagatagctatacaggagctgtgacaaccattaaaaaagaggatttgcaaaaagtgggaaaccaaaatattttgcaatcattgaaaaatatagatccgtcatttcaagtgttggaaagtaatgaatttggttctgacccgaacagagttcctgaaatccaaatgcgaggagcttcaaacttctcagatatgaaagataaatatcaaacaaatcctaatcagcctttgtttattgtggacggttttgagcaaacgatagagaaagtgatggatatggatatgaatcgagtggcttctgtcaccttattgaaagatgctacggcaaaagctttatatggttctaagggtgctaatggtgttgtagttattgaaacgatagctccagaggccggacgtttaagagtatcctatacaggtaacttgaatattcagactcctgatttgtctagttatagattggctaatgctgcggagaaattggaaatagaacgtcgtgcaggtgtttatacttctgtaagtaataatcctgtagaacagcaactgaaagatgaaaaatataatgaatatttgaatgaagtgattcggggggttgatacctattggttaagtaaacctctgcgtgtaggtgttggacataaacattccttgacgtttgaagggggtgatgatgctgttcgttacagtgttgatttttcatacaataaagtgactggtgtgatgaagggatctgacagagaagtgatttctggtggatttaatttccagtatcgttttggtgattttttgtttagaaatcagttgtctgtttctttcaataaatctgacgaatctccttatggggcattttctgaatatgcacaattaaatccttattggcgtccgtataatgaagacggaacgattcgtgaggtattgggagattataatgtagcaaatcaacagggctctcatccaatttataatccgttaattaatgcggacttaaatacaaaaaattctactgattatacggacataacaaataatttgtatgtggaatgggatgcttttgagggaatgaaagtaaaaggacgtttaggtattattactcagaaaaatggtagcgaagtatttttgccaagggatcatacttccttccgtgatatttctccggatagtgaagaatattttacacgagggaaatatactatgggtaatggaaaaaattctgatattaatactgatatttccttgaattattctaaaatgtttggcaagcatctggtttttgctaatgcacaatggagtttaggacagagaaaaagtgagatggtatatttccaagcagaaggttttgccaataataaaatggattatattactcatgccaaacaatatgtttcaggtagtccttatggtgacgaatcgatgtcgcgtgaaacgagtatactgctttctgccaactattcttatgatgatcgctatttgatggatgccacttatagagccaatgcttcgtcattgttcggtagagataaacgttggggacatttttggtcagctggtattggttggaatattcataaagagaaatttatggagaatgtaactttctttgaaaaattgcggttgagggcctctacaggatattcaggttcgcagaattttaattcttatcaagctgttgcaacttataaatattataatgacagttacgataatataatcggttcttatttgttaagtttagcaaatcctgatttgcagtggcaaaaaacacaggataacaactttggtatcgaagtttcttttctgaattcagttgatataacttttgactattatatcaagaatactaaaaacttgttgactccagtatctttgcctccatctgtaggatttgatagttatacggaaaatttgggtgaaacaaagaataaggggttggaggctaaaattaactatcgtgcaattaaagatgcagagcgagaactttattttagtgtgtatgcttctgcaatgcacaataaaaacaaaattacaaagatttcagatgctttgtccgtaatgaataatgaacgtgatgaagaaaaggtgaatggaagtagttcgaatccggatcatgaaaatggtaaaggggtaaccaagccttctgtacgttatgcagagggacaatcaatggatgcaatttgggctgtgcgttctttgggaattgatccgatgaacggaaatgaggtgttcctttctgccgatggtaagatggtttatgcttggaatcctaaagatcaagtggttgttggagacgcattgcctaaagtacagggtacttttggatttaattttgaatataaaggatttacggttaacacctcttttgcctataaattgggagggcagtattataatcaaacgttggtggacaaaatagaaaatgctgacattcaatataatgttgaccgacgaatgtatactgatcgttggacaacacccggtgtagccgcaaaatataaagcttttaacagtagtcagccttttacacgtcctacatcccgttttgttcaggacttgaatgaattgtcaatgacttcattgaatattggatatgatttccgtaattggaagtttatgaaaggaggaatgatagaacgattaaaagtacaattctatgcgaatgagttattcagagcttctactgtgaaactggaaagaggaacggaatatccttatgcgaggaccttctcattctcggtacaggcaacattttaaatgaactgattaaagttaggaatatgaagaagaaaatatatatattaagagttgttgtatggtgcgtattggtatcatttgcatgcacttcttgttctgattggctggatgtgaagccgaaaacagaggaggaagctgaaagtatgtttagcacagaggagggatttaaatctgcattggcaggagcttatattgctttgtgcgagcctgatttgtatggtaaggaattgacgtttgggatgcttggcgttttaggacaggagtggtcgggtaaggaaggtccggtgagtgtaagccagtcagcatataataattttctttattatcgttatgaagaggttgttaccaaaccgattgtagaggctgtgtggaaaaaaatgtacaagaccatagccaatgtgaatactttgattgaatatacagatttgaaaagagatgttctgacaggaaataattatgaaataataaagggggaggcgatagcgttgcgcgcttttattcacttcgatttattacgtctgtatgctgattgtaattttgctgattcagtatcggctataccttatgtgaaatcttctaagccggctattacgccacagtcttctactagtgaggtggtgcgcttgttggttgaggatcttgatgatgctcttgaattgcttgaaaaagatcctatttttacgggtcaggatgtttccggcgtggataacggatatttggttaaccgaaattttcacttgaattattatgcagtgcagggattgaaggcgagaatttatgcttatgccggtaaaatgcaggaggcatataatgctgcaaaaattgtgattgaagctcaggaaaattcaggtgtctgtccttgggtgaataagaacgatgtgaatgcaacgaatacagcattgagagaccgtacattttcctctgagcatttatttgctttgaatacaactaaattgattgataatatcaaaggttattttaaagaaactcttagtccattgaaaagtaggatagctccgaaagatgctgcggattgtttgtttgtgacaggtgattatagaggattgttttttgaaagtgataatggagctgaaaatgtgttgtcaaaattctggcagatggataatcagattgttggaggtgagactgtgagaccaaagagagaccgtatgccggtgttgcggatttctgaaatgtattatattgcagcagaatatctgaaagctgttgatgctcttgaggcattgaatatgttgaatatagtgagagaacatcgaggtttggttgagaaattgattgatgtcaatcctattgcaattcagaatgaaattttaaaggaataccaaagagaatttttgggtgaagggcaattgttctattatcacaagcgtttaggcactaaaaatattgctactgctaatgcaaaatatactttaccgatgccggatgatgaaattgatttaggacaaagaaattaattttaaatatcagagaatatgaagaatatattgaaatcaggtttgttattattggcattgcattttatttttgttgcttgccaggaagatgaaatcgagacatatcatggtcctgatgcagttaatttattggtacaacgcaaggatagtgcagagttttcttttttgaatgcagatccttctttgaaagaatatatatttgaaatagaagttcagattcagactgttgtacaggatagagaccgcatggtaaacttaggactaggagatagaacaacgggagagttagggacaaattttgaagttgccaaaagtgtgactattcctgccggagagacaacagtaatattaccggtgaaggttttcaaagaaggattgaaagatatcgaaggtggcttggtggcagatattgtggtagagccatctgcagattttgttgccggagtatacggcaagatgaaattggcgttttccggagattttcccaaagattggtattcaagtaccggtgatgtaggagcaatcccatttttttgggggaaatgcacaaaagcaaaatatgagtttgtatataattacataggtacgatagatttgaaacaatgggcaaattgggattatacaccaattattgcaatgcaaggtgaattgaatgcagaattggatagaattgcagcagaaacaggtgagcgtgtaaaggatgatgatggtagtgatatgtatttttcggctaatacatagggataaattctagacgtttgtatgatttaaatgaatatatttatgaaaaagatttttaatacatcatatataccattggtgttggtatttttatttgtcgcctgtttcgatgacaaaggtaattatgactacaccgatttgaaggatgcagtcattgatattccggaagtgacagctaataacggaaaaatcagtcgtgacggatatacagagttgacattgactcctgatattaaatttaatatgggtgcaaaggctgaagagtttgattttgagtggagtatttttcctcaatctccaaaggctgatgaggatgataaatatgagtcgaagaaagtgattggaaatgaacagaatctttcctggacgattgatgtggctcccggtgattattatcttgtattgcgtgtaacacataaggttacaaaggctgttactgattataaattcgaatttgccattaatacgataacaggttgggttgtttacgatgagaaaaacggtgagggcgatttacatgttatccgtgacagtgaaatcgtaccggatttatcggaggaacagaccggagtcgtatataattgtttttcaggttccaatgatgggaagaaattgagtggcggtaaatttttgtcatggaggaatatggataatagttatgatcatatttttgtgtggaaagaggatggttttgtgaagttggaagctaaaacttacgaggtggtgtcggaagattactcaacgatgttttatactcagccttcagtctatgctcctatgtgtcattattatgagaatcctgcttatgggcggatggaatttttgatgaataataatgaactttatattattaagtggaatacgatggggcagacagaaaagtactcaatgcctttaagtgtgtttggtatggccactaagtttgctccgtttattgctcctgttcctgcgagtggtggtaatacaaatcgtgctgtattatatgatccttccggtaatggtggattcagaacaattgccaataatggttctagtgcaaattatccaagtgttaccggaggagtttacaatccgttgaatatgaatgaaagtggtgcattaaaattaaatttgatagctatggagcagggacgtgacggtactacttgtgctgtttttagaaatgaaaaagataataaccatccatggttatatactgcggatttccgtttggcagcttctcctcttactttggcaaagtatgatttggcaaatttggaaaatatcgataaagctaaattgtttgttttcggtaatcgtggagatgttatgttttattctgcagataatcaagtatatgcttggacatttggaggagctccaaaagcaattcttccatcagaaagtggaaatgtgacagccatgaagttgtatacgcattcaaataatgaggagtataccggtcgaattttgtttgttgccacttatgatggtaatgagggaaaagtatataaaattacgtttaatgaattgaatggggctattgtaaatacacaagaatttaaagggtttggtaaagtaatagatatgataattaaagaatagtgttatgagaaagtggattttaagttcatttagtttgatgtttttgttggcagtatttatactgccagcaaaggctcagaatggggtttttcaagatttaacttgggaagaagctgctgctttggctcagaaagagggaaagattgtgttggtcgatgcaatgatgaagccgatgaacaatgaaatgaagcaagctaaagtacagcaggatcgtgcaatattcaaagcgaaagaagtggtggattttgtgaaaaagaatactgtcgcaattcgcattgatatgggttctgaggctggtatggcttttgctcctaagttggtgatgaatatgtatccgacgtttggattttttatgccgaacggtgatattttaggaacagtaagtccttatgtattggagaaagatcctacagcattgataacggccggggagaaagctttgaaggcagcagaggtgaagcgtaacaacagtcggtctattcgttttgaagatttgacttatgaagaggctgttaaaaaagcggcaaaagaaaataaattagtgtttattgatgcgtataccgattattgtcagccttgtatgttgatggtgaaaaatgtattttcgctgaacagtgtagctgattactataatgagcattttatcaatgtaaaacttgattttggtaaggaaaaaacattggcaaataaatttaatgtgggtggatatccggcttttatttttgtgaatggtaaaggaaagccggtgtatatagcaggaggatacaccgaggaaaaggagtttatcggttatggagaggaggctttaaaacaagctgtcggaatcgcttttgaaaaaggaacttggcaggaggctttgacaaaggctaagaaagagaataaaatgattttcatggattgttatacttcttggtgcggtccgtgtaagatgttggcaaaagaggtgtttaccgatcctgatgctgcaaagttctttaacgagaagtttgtgaatgtaaagtttgatatggaaaagggtgagggtaagatgctaaaggataaatatggtgtgaaagcttatccgacattgtattttatcaatgttgctggagaagttgaacattgtgttgtcggtggaccggatttagcaggtttattgaaagcaggacaagatgccttggaagggagaggattggttgctatgacccgaaagtatgaagctggtgagcgtaatcctgagtttgtggtggcttacatggaagcattggaagcagcatatatggagaaagaagttgagaaggtatgtttggagtattttgcaactttggataaggcaaaattaagtgagcgtaagtattgggctttgtttgcaaagtatgtgaatgatgttgatgcagaggtgtttcaatatgtgtatgagcatcgagaggaactttatggaaacattggcgaaaaggaggtaagaagaaagattgcttctgtatggtcaagaggtgcctatgaatttgtaaaagaggaaaatggcaaggctgtgttagatgaaaaagggttcaaaaaatatgtaaagcgcttgaagaaaacagatgtgcaagaccaagaagagattattgctaatgcaaagatggccaatgccgagaaagtaggagattggaaaacttatatttcgttagggaatgagcagttaaaggctggacgtgtcggtgatatgttattgttcaattggggattgcgtgtagatcaacaatgtaaagatgaggtgtatagaaaacaagcggcacagtggtttattgatgctgcggctgtatctgccaaaaaagaagcagaaggaacggttggtatgatgtcttatagaaaattctttgaagagttggctgttagtttacaaaatccttggaaggaaaagaaaagataaggtatttaattttttagataatcagtatgagaaaattattaaatttagtgttaggtagttgcctgttattaggcgttagttcggtttttgcgcaaaaaacaattacaattaagggaaaagtgcagttcccggagaatcgttttaagatggaaattattgaacggaatggtttcgataaaactattttggattcatgtgatgtgcgacctgacggaacgtatgagtttaaaatgaaagtaaatcgtccgggagtctatacattggattgtcagaagtggcaaagtgtacagttttgggcggaagatgaagatttggaaatcaattttcgtggaaaagatactgctaaaattgttataaagaatcctccttacgtgcatattaatggtggacctaataatgaattgatgaatttgataaattgggatggttatcgtggttatcaattgatgattgcagtttctcaaggagtatatcggattcagggtattgacgatcaggcaaagcaacaagtttcaggtaagttttatgatatgttgggagaagagtcttctgcaagaataaaatatttggcggaacattatgctgatcgtaatagtgtgttggcagtattggcccgattgggaggtgaggagaatgcagaattagtggaaaaagttgtggctaaattggaagctaaaaatccgaattatgctccgttgttgaagtttaaggctgatagagccgatgcaaaagcacagagagagcgtttggctgagggtaaggtggctccagaattttcttatccgactccggatggtaaaaagaatttgggtcctcaggattttaagggaaaaattttggtgttggatttttgggcttcatggtgtggaccttgccgtcaggagattcctcatttaaaagaggcatataaagcatatcatgataaaggtgtagagttttttagtgtgtctattgataaagatggtgctgcgtggagaaaagcgatgaaagaagagaatatgccttgggagcaagctcaagcacctaaagccggcaaggatgttatgaaattgtatcagttttcaggaattccttatattttggttctggataaggagggaaagattgttgcaaaaaatcttcgaggtaaagccttgactgataaattagaagagatgttgagcggtaagaaaaaacaaagtattgctatgccaatgatgggtatgtaatttgttagagattcttcaatttttatgtttttagtgtacggggtactcaatggtaccccgtattttatttgattataattttccctccgggaacaacagcttgtatattattgtcatacatggcagaacagtgtatggcaggaagcatatactctccacggaatgcagcattacagcggaaacggaaagtttttgtttctccttgttgtaagctgaaataaacgtagaagcggtcatcgcgaatatcaaaattgtctgctccgggcattgtcatgttaccggtgagacgttcgttgataatttcgaatccggaaggcacaagatagtttagtgctaattcttggtaagttccggttaaacctgtgttttgtatagttatttctatggtaagatcttctccttgtggtatttcgctattattgatacgagcacctttactgttataataattagcttgcatggagagtcctgatgctattttttcggttatgggttctaaggatgttgttgttgttatgcagcgagcgaataatacgctttcaccatcgttgtggatggtcgcattgatttgtttattttgaagtgtaagtggaatttgccaaatggttttttcgctgcgaatctcttttttgccttgttgggtcataatcgttgcttgcaccccttgctgttgtcctatgtatttattaacaaattgtgctgcagcatgtagggcaaaggctgtttcctgggtactacaccaagcataggaccctattgtcttggatattttctcaagcatgcggtaggcatcctggcgtctatttaaggtgaccatagattgcaatagtatggcattgtcacgagtcgtagaaccgtatgtcctgcctgtttcacgataggatgcaacttcttgcgagagattgcgaatcatattgtcggctattctttcctgtttgcaaagagtgtatgcggaggctaatagccaaatgctggtaggacgctgtaattgagactctttcaaacggttcatagctgccaaatccggttgtccggatagggccaagacgtataggcggtatgcttgttcttgttgttcccaaggctctgagccatgccatgtattgctacttctttttaaatacgtgatagcattttgtaaaagttgttcgggaattgtatatcctttttgaagagctgatattaaaaagtgtacagtataagttgttgcccactctgctacctgctttcctccttgccagtaggcaaagcctccatcgctggtttgatagttggaaagacgactgataacatctcggatattagactctgcctgcaacagttgttctgctgaaagttgaagcaatgttgaaagtgacaattgtgggaaagccttagaagttatttgttcaagacatccgtgagggtattctaataaataggcaagacgttgctctatatttaatgcaggaatggttgatatttccaatactgaagttggatcataacctgagattttagagtcgaaagaaaaactttcgcccattttgatttctttctcttctatttgggttattctgggattaggtatccgtatttcaatattttctgttgcactagcttcttcattatttgcttttgcagttacacggattgttgatgtacctatatttttattgatttttgctttgaaataaactacttgttctcctttattatcaaattgaactgttcgggaatttccattagttaaagtgattttatcgtcatttgccatgtggatatttacttcacggatgtggtcttttaaagcaaaaatggttactggaatatcaatgacatctccaggggtgagtaagcggggtaaagctatgcttaccattaatggtttgtttacttgactgttaatagctgtagagccatatttaccattgttagctgcgatgaccatagtgcgcacttctcctatatattcaggcattttgaacgtatggttgccggtagctccagcctttaatgtgaaaggacctgcaaatagaacaaccggtttaaagcgattggttttttcgtcttgaatctcttttaaggtttcgtcacctcctactgcaaaagctttgtctaaacgggcaccataagcaccataaatgaaatcatagaaatcccatgtttttacgcctaaagcttcgcgggcataaaatgccgagaagggttccggtgttcggaaggcagtaagggatagcagaccttcatcaacaattgcaattgtatagttcatttcttgaccgtttttttccttgacttctactgtgaagttttgtcctggacgaagttctttgggcatttttatttccgaattcaaccgtagtgacggatcgtcgatgttgacgtttactactccatacatgcggatgggacgatcattgtctcggttactgtgtggttgtatcaaagatactgcgatgtaggtattggggcacatatcgctggttgctttgacttcaaaagtcgttgcttgattggatgacaatggtaatcggcagatatcactgactgtttttccgttttcaagactgacaatggctacggcacctgcaacagatggaatttgaatacggatggtttctccgactttgtagttttctttatctgtgctgaggcgtagcattgtggctgtttcttcattggcattgtcttcccaatttcccatatagacaatcactcctgtggtatgtcctgaaggagctgttgcacgaatgaagtatctgccatgttctgtaatatttaagtctgtagaaaattttccgtttgtagcttgaatggttgtatggatgatacttctactgtattcgcggttaatgtatgaactcagatgttcgtcttctgcatcccaccaccagcgccagttgagtttgtatacttcgatttgtattggagaatttccacttaaaactccagtaggggatactgttattccctgtatgcgaagtggggattgggtggaataccagttgtccccatctgcagtttccggtagttttattcctacatattgcgtatagggagaatatagaattctttgagagctgatactgaaatctccgctattttcaaatacacgtgtcgtaaaaatggcatttagtagtcctggagcattttctgctttaatcttttgtgtattaaattcgaagttacccttactatccgtattcccttcaaaaagagtagctgttgtcggttcgaaatatcgggtacggtctgagaatgtatagtccggaaagttgtcaaatccggtattgttgttatatagtttgacttctgcgatggctttttggttggaggtttgtgcgccatttagccagcgggtggccactttgacaattgagctggagccccctttgccgataattttgtcattggcaaattccatctgtattgccagacgattgggtttaatggtctctattcttaatgttttgcggaaagtcagaccgcctatgcggaataacgcattccagtaaccggtttgtgctttagtatctgttttgaaggtaaaggcgtgaatgttattttttccgatactgccttttagagtttgtactatgtgtccattggggtctgttaattgggctatgatggggtgtccctccggtaataccttcattttatcttcaagaattaaagataggtaaatgttatctccgggtcgccatacaccacgttctccatatataaaaccttttacacccatttgtacatgctgtccgttgacattgaaattgcttagtgatagagcgttgccatcagccagttttagccatgctcggtcgttgcctttttgggctaagacaaccaaagctttaccatggggttgtagggttgcaaatccttcctgattggttagggcagagtctattttttgattttgataattatataggcttaattgacaatctgaaatcggttgtgcggaaattaaatcagtaatgcagatatgatagcgattgtctgcacctaatttcgccatgatacctaaggaagtattgatgatattgcgggctgcaaaccgatcgaaattgtaataggatacgctgttgggattgtccctttcggcccaattgtatccagtaggataactgtattcgctgtaataggcatagccgcttttattttcccaatcggtagtgccatagtctgaatccggttcttcgttggcacaatccaaaatagtgtatgattttttgaattttagaacgatgcggtaaacattgcctttttcgagcttgactaattgcgaaaggtctatggtgaaatcattccatttgtctaattgtatgttgggatgttttttctgtaagtcaattgtctgcatgaatacaggacgtgctgtgcgaatcaagtcaaaagaactggtataatcattttcttgtaggaaaaaattcatgttttgattaagcacttgaatgatttcaacgtcaatggcttttaatccgacggcagagaatggtattagtactttatttttttccggaacaattactcctttgccgataagttctactgctggttttgttgtgcggagactgattgaggtcgaatattcattttttaaagaatttccatgagcacttcgaatgcccgggaatatatttagttcaacttcagtttttgatatggacgtagggagataggctcgtatggcattgccgtcaattttaaagttattaagcgtgatgccgcgaagtgtgaccagcccgtttaaatcttgttgtggatctatgttttcagacatgtatatgctgatgacagccggttgtgtatttgatacttcaatgtttaatattgtaaattcgtgaagtccaggtattgttattttttgttctttgtcattatttacctctttgctaaatgagaggagtagggtcttggatgtgttccctttttcaagattggtgatacggaaatggtgtcgattgcccatatgattccaaatgggtacaatattttgattggcaaaagttgcattcagcatctgttccacttttgtgggttcgatataatcggagcaatgtaatgtcccttgatattctaatgctttatcattgtcgggcgatatggttagttgcccggtttcaaatagacaggaaagaggaatgatattgaattggaaggtgaatgcttgatgcgctttttctaccttgcatagcttgtctagttgaagcgtcgctttataggttttgccatttgtaaatggctctgttggaatgaattctatcgaatgactgtcttttagaatgagctttcctttcattgtcggtgaaaaattcagtatattgtcaggaagggcagaacccggttgaaaatctttgtcaataggaaaagccgtatatatttggataggtgtgttggaggtgataataccgctggtatagcctgttatatattggctgaaatctgttttttctttgtggttacaaccaagtagcgtaataataaggcttattacaattgcgatgaaatatttttgtcccatattccgtattttttaatattgtcaataacaaatatagtgataatttgaacaaataacgtaactttgcagacaatatgaattgcctaaaatagaaaatatgagaatagctgtagtaggaacaggttatgtcggtttagtatcgggtacttgtctagcagagacgggagttacagttacttgtgtagatgtagatgctgtgaaaattgcaaggttaaatgagggaggaatccctatttacgaaccggggttgtctgaattggtggcaaaaaaccgagcttctgaacgtttgttttttactacttctttgaaagaggcattggtggatgctgatgctgtctttattgctgtcggtacacctccggatgaggatggaagtgcagatttgcgttatgtattaggcgtagctaaagagattggcgagttgatagaggattacgtcgttgtggtcacaaaatcaacagttcctgtaggaacaaatcggcgtgtgaaggctgtaatccagtctgaacttgaacgtcgtggagttagtatctcttttgatgtggcttctaatccggagttcctaaaggaaggagatgctgtcaatgattttatgcatccagatagagtggttatcggtgtagagtcggagcgtgcagagaaagtgatggagcggctttaccatgcttttgtattgaataatacccctatttttttcatggatataccttctgctgaaatgactaaatatgcggctaattcaatgttggctacacgtatatcttttatgaatgacattgctaatttatgcgaattggtaggggccaatgttgatgcggtgaaacagggaataggaagtgatactcgtatcggaacaaaatttttgaatgccggatgtggatacggaggttcttgttttcctaaggatgtcaaggcattgattaagacaggggatgactatggctatgcgatgggggttttaaaagctgtggaagaggtaaataatcggcagaaaacattgttgtttcaaaaaatatggatgcattataacggcaacctggaaggacgtcattttggtctgtggggactttctttcaaaccggctacagatgatatgcgcgaggctccttctttggtattgatagaccagttattggaggccggagcaacaattacagcttatgatccggtagctatggaggaatgtcgtcgtagaataggtgatcgtataacttatgcatcagctatgtatgatgcattggaaggagctgatgccatgattgttgtaacagaatggcaggagttcaaagttcccaagtttacttatatagaacgtgctttgaaagaaaaagtgatttttgacggacgtaatatttatagtccggaacagatgttggaatttggttatatatattacgggataggtagatgacagattcccgtaggatattatttatcattaatcccatttccggtttaggattagggaaagaagtgcccgaacatattaaaaagttgccggagtacgaacatgttgtatatgatattgagtttaccgagtattccgggcatgctcgcaagttggtcgaggatgcacggctctcgggtaaatatacgcatattgttgcggttggtggtgacgggactgttaatgaagtcggtgctgccttgtgtggaagtggtatcgcttttgctgtcgtttctttaggtagtgggaatggatttgcccggcatttgggatattccatttttatgtctaaagctttgaagcaagtgttgactgagcaatatgtaaatatagatgtgttgcagataaacgataggtattcactgaacgttagtggggtagggtttgatgcagaagtggctcatgaatttaatcatcagaaattgcggggagtattttcatatatttatgctgcattgaaattgtggttccgctatccggaaaggaaatataagataatcagtgatggtaaggcgatgaaagtgagttgctttatcctttcttttgcaaatacctcccaatatggtaataatgcatacattgcccctcatgcatctgtatgcgatggaatgatggatatttgtatcttgaaacggcctgcattctttgagattatatggtttttactgttttttgtgagtgcaaaactctacaaagtatcttattttaaagaaattcagtgtaaggaggcgatcatagaaggagatataagccgtatccatattgatggagatgcttatattatgaactccccacttcacttgaaggtattgcagggagctcttaaagttgttgttcctaaaaaagtgcgttgaattatttgatgatttctttagctactttaaacatatatttcttggcttcatcgtaattattgccgataattccgtctaatattgcttctttgatggcatttttaatatctcctatggctttgcaagggggaagattaaaggtggctataatctcttctccactgataggtggctgaaaattacggattgaatctttttcttccacttcttttagtttgcggcgtacaattttaaagttttccaaaaagcgttttactttctcttcgtttttggaggttatgtctgcttctgccagtgtcattaagtcgtcaatatcatctccggcatcaaatagaagtcgccgtacagcagaattcgtaacgatatcctcactcaatacgatgggacgcatgtgcagatttaccagcttttgtacgtatttcatcttttcattttgaggcaacttgagccgattgaatatttttgccaccatgcgttcccctacatggttgtgcccatagaatgtccaaccttgtcctttgataaattttttggtgacaggtttcccgatatcatgtaaaagtgctgcccaacggagccataaatcttctgtgtatagagacaatgtatccagtactgtcagcgtatggtagaaattatccttatgtttcactccattgacattttctaccccctttaatgctaccagttccggaaagaaaatttccaataatccggactcatcaagcaacagaattcctcttgacggttccggggatagcatgattttattgaattcgtccataattcgctccattgagacaatcgggaggcggtgactgaattctttaattgcgttaaaggtgttttcttcaattcgaaagtttaattgcgatgcgaagcgaatggcgcgcatcattcgtagcggatcgtcagaaaacgtgatacccggttccagtggagtcttgataagtcgctcatctaaatgttcgattcctccaaacgggtcgattaattcgccataatttgttttgtttaaagatatagccaatgcgttgattgtgaaatctcgtcttttctgatcatcatcaatcgtgccttcttctacaattggtttgcgcgaattagctctgtaagattcttttcgtgctcctacaaattcgatttccattcctttgtagcgaaacatggcagttccgaaatttttaaatacagacacatgtaatccccctaaacggtgtgcagcttcttctgccaattctataccgcttccgtgcacaacaatgtctatgtctttggatggccggtgtaataacaaatctcgaacatagccgccgattacatacgcttcgattcctttttcatcggcaatttttgccaacacttcaaatatggggtgttttaatggtaactgcattttctctatttcaatgaatggttttagtattgaacttgcaaaaatatgaaattaattggtgaatgagaaatacaatgatgtgttctggggaataataaaaaaacgcctacttgatttttgtgaatccctgtaggcgtttggtatgttagaaatgtttatttacacaattccggagaatcccataaaagccatggccaacaaaccggctgtaacaagagcgataggggagcctttcatccctttgggaatgtcgactaattccagatgttcgcgaattccggcaaagattgtcagtgccaagccgaatccgatagctgtagatgctgcaaataccaacgactccaacagattgaaatctttttgaatgaccatgatagctacaccgagcacagcacagttggtggtgatcaaaggtaaaaacacccctaaagcttggtatagggccgggctgacttttttcaaaatgatttcaaccatctgtaccaaggctgctatcacgagaataaaagtaatagtttgcataaagcctattccaaaaggatcgaggatgcttttctgtatgataaacgttaccagagttgctagaatcatgacaaaagtcaaagcaccggtcatgccgattgccgtagaaactttttttgaaactcccaagaaaggacatattcctaaaaattgtgccaacaccacgttgttgacaaatacggctgctataaatatcagtatatattccatctttctctttctttaaaaattaatttgtttttctcagacggttgaccactgcaatcaaaaagcctaatgccaagaaacctcccggtgccaagacaaatgccaacattccatattggtcgctcatgatggtgatgtcaaagatttttccgctgcccaataattcacgaatggcacccaataaggttagactcattgtaaatcctaatcccattcccagaccatcaaaaatggaggctatagcgccatttttagaagcaaaagcttctgcgcgtcctagtacaatacaattcactacaatcaatggaataaacaagccaagtgattcataaagagattggacgtatgcctgcatcgaaaagtcgactattgtaacgaaagctgcaatgatgacaataaatgccggtattcgtactttgtccggaatcagattggcaactaaagatatcacaagattggacatcaccagcacaaaggtggtggccagtcccatacccatgccattgaaagctgaagttgtcactcccagagtgggacacattccgagtagaagtccgaatgtcggattctctcgaaaaagaccgttggtaagtattttaatattactcatgttgcaatgttttactgttgattgttttgttgcgttgctcctgaagatgcatcagtaccgttaagagctgatgcagcacgattgatggcatcaaggaatgcccgcgaagaaatggtcgctgctgtaatggcatctacatctcctccgtctttgctgactttcaagcctgtcgttcctggagtcttccctttgacattccccggattgccttcgcggaaccaaaagttcattttgcttcccagacccggagtttctttgttaatcaaagccgagtaatcattgatactgccatcgggattgaatccgaccataatttctatgtagccgttaaatccattattggaaaatgttttaactgctgtaccgatagattttccattatgttttgccggataaaattctaaaattcccccatccatttctttggtccatttttcggctgcagggtcattgtcaaattcgccgggcaatacattgctgatagctgcctgttgtttatcttgggctgctttttctattgggcctttggtcaatgtgtatacatatcctacacctgccgaggctattaggctgatgctgaaaagcaccactaccatattgataaaattcgattctaatttctttgccataatcttaagattaagaaatgaatgtgattacctatgcaaatctggttggtttgcaatatctgttaatcaatggtgtgaaggcattcatgattaaaatagcgaacgacataccctccggataggctccgaatacacgaataatgatagtcaggactccaattcctacaccataaataatcatgcctttggaactcatcggggaagttacatagtctgttgccataaagatagctcccaacatcatacctcccgtcagcaagtggaataatggatttacaaattgtaccggatcgcacagatgcaaaatccctccgaatatgacaaccgttgcaaaaatggttacgggaatatgccaagtaataatccgacgaaaaagcataaaggcaaagccgactagcagggcaagtgcagccacctctcctaaactgccgcccatgttgccgagcagcatgtctttataggtcacgaatccttctgtattcaacacctcattgaccggtgtacctgttttgacagcttcctttagcaaggcaaggggagttgctcccgtctgtgcatcaatataggatgtattgaaaccttgagtcatcggccaggtagtcatttgtaccgggaatgatatcagcaggaatacgcgtcctactagggcagggttaaaaatgttgcagcccaagccaccaaaactcattttaccaatgccgatggcgaccaatgctccgatgagaataatccatatcggaagattagcagggacattaaaggccaataatactccggttataattgccgaaccgtcccagatggtcggttggcgtttaaggatgaatttctgaattagatattcaaaaatgagacatgccagcaccgaggttaatgtcacgataatggctcccatcccgaaaaacacgaccgaacagataaatgccggaatcagtgctatgagtactccatacatgtttttttcaatggaatcgccactgtgaacatggggagaaggagatatcaataatttattcatacgcttaaatctctgttttcaaatttatttctttctgtttctaatcatggcgcctgtgcgtccttttcctaatctgatatagtcaagtagaggacgggaggatgggcaggtaaaactgcatgaaccgcattcgatacaatccatcactttttctgcttccagccgttccaatagattgttcatcgctaatttagccagtagataaggctccaggcccatgggacacgctgatacgcatttgctgcaacggatacaattccgtatgggtttgcgttgggcttctttgtcattgataagaagaataccgcttgtacctttcatgataggtgagtcaacgtttaccatcgtacgtcccatcattggaccaccgccaataactttggccgtatcttccggtattccgccggctgcttctattaattttgaaacaggagtaccgatgcggcataaataattgcccggatgtgcaaccgattttcctgtgacggttacaaccctttctatcaatggtttgtgctttacaactgcttcatataccgctaaagcagttccgatattctgaacaacagctcccactgcaataggaagtgcgcccgatggtacggcacgacctgttgtcgcttgaatcaactgcttctcacctccttgtggatacttcacctttagcggacaaatttccactccggagactttgcttgccagttgtcttaaatgctcgatcgcgtctttcttgttgttttcaataccgataatggcttttgatacaccaattgctttcattaaaagctgtacaccgacgattacctgttcgcctttttcaagcatgacgcgatggtctgatgtcaaataaggctcacattctactccgttgatgattaaaaattcagctttgcttcccggtggaggtgtcagtttcacttgtgtggggaaagtcgctccacccataccgacaataccggcagcagcaattgctttgactatatcttctttggacagatctgaatttgattctattttgtcactacggtcgatttccgatacccattcatccccttctactttgatggtaatggcaggtttggaaaaaccggctgcatcaatgatattgtcaatggcaacaacggtgcctgacacagaactatggatattggcagatacaaaaccggttgcactggcaatcaactgaccggctttgacagtatctcctttttgaactacgggggttgccggggctccgatgtgttggctgagcgggatgattacctgttctggaacaggcaatattctgataggttcgcttgccgataatttattttcaggtgggtgaacaccaccgattctgaatgtctttaacacagcgtatagtatttaaaattattcatttttattattatcgttagcagccggttttacagccggatttgctttgacggcatctgtctcaactttccggggagggaagtttacttcatgaatggccccggtgggacatacaccgacacatttgcggcatagacggcatttgctgaaatctatgtacgccaagttgttttctacggtgatagcaccaaacggacactcttttgcacacttgccacaaccgatgcaggcagccttgcatgctttgcgggcaatggctcccttgtctttgtttacgcagctgacaaagacgcgacgatctttcactcctttgttgcgcaactcgatgatgtttcgggggcaggctttcacacaagctccgcaggcaacacatttttcgttgtcgacaaccggcaacaatgtgttcgggtccatgtgtatagcatcaaaaggacaggcttttacacaatctccacaacccagacacccgtatccacaagccgtttctcctacatacagcgagtgttcgatggcgcaagtccgtgctccgtcatattgacttgtgcggggacggttttcgcagttgccgttacacttgaccacggcaatcttaggagcctgtgtactgacttcccttcctaatgcttctgcaattttgctcatagttgccgagccgcctacagggcacatgatgccatccagcgaatcggactttactgccgcttcagccagaccccgacagcccggatatccacaacctccacagtttgctccgggcaacaagccttccacgatgtcaatacgcgggtcttcctccactttgaatttttgtgcaacaaaataaagtatcacggccgatacaataccgatagcacacaatgaaatgatggtaataacaatagtactcattatctaatatttaatagttgccagttttttcaactgtgaattttatctttttactgattttgtttttcaatagatataatgcaaaaaaatacaacatcagcagaaacagactggagatggcagctgtaagctcgctgtattcagatttttctataaaaaaaatggctgcaatgattaaaatggaaggaaatatataggctaataaaacagaataaaaagcattgtggagactggctgtcactgtcactttttctcctacggcaaaattgccttccggacgttgggctacgatgattttctgtttcgcatcagacatcccgcatgcacctttagcgtgacatcctgaacaggctgaaaggctgacaatcatcacttccaaggtctgttccgaaatgctttttataattccttcgtgctgtattttttctgtatctgccatacgatttcataaaaaacacacgcaaagttaatatttaaagggaaaaagtaaaaagtaatatgttaaaatataagaaacattctggaaaatgtgatgatgagggaaaaaatatagccggacaattatccggccatacatcggttttatttttttctcatgaaaatctgaatcgggactccggtgaatgtccagttttcacggattttattttccaaaaatcgtttataaggctccttcacatattgtggcaggttgcaataaaaggcaaacgatgggaaatgagtaggcaattgtgttgcatacttgattcggacatatttccccttggtgctaggtgggggataattctcgatagcctccagcatgatgcggttgaactctgacgtctttaacttctgttggcggttttcataggtacgcaatgcagcttccaatgccttcaacagacgttgtttggtcagtgcagaggcaaaaatgatttccacatctttaaacggggcaattttgttgcgtagattcttttcatattcaatcagggttttgttgtctttctcaatcaaatcccatttattcacaacaatcaccacgcctttcctgttgcgctcaatcaggtggaaaatattcaagtcctgtgcttccatgccgcgagtggcatcaatcagcaacatgcagacatccgattcttctatcgcacggatagaacgcatgacagaatagaactctacatcttcattgactttggcttttttgcgcacaccggcagtatccactagaatgaaatcgtgaccgaattgagtgtaatgggtatgcagggtatcgcgggttgtgcctgcaatatctgttacaatattacgttcttttcctattaatgcgttgatggtggatgatttgcccacgttcggacggccgacaattgtaatacggggaagatggtctgtatcttctattgtatcttccttaaaatgtttcactacttcatctaacaagtctccggtacccgaaccggtcattgaggagatacaaaacaagtcgctttttacgcccagacgataaaactcctgagcttcataaaggcgctcgctgttatccactttattggccaccagatagaccggtttgtcgatgttgcgcagtaattgggcaaaattctgatccaagtcagtgattcccatttctgcatccaccagaaagatgatgacatctgcttcgtccatggccagcataacctgcttgttgatttcttcttcaaaaatatcatcactgttgcagacatatccacccgtgtcaatgacggagaattctttgccgttccatgaagattttccgtagttccggtcgcgagtcactccactttcttcatttacaatggctttgcgagtgccaatcaaacggttgaagagagtcgactttcctacattcggccttcctactatcgctataatattactcattgtattaaatttatgctatttgtttgcgtaaccgaagtttttcagttcgctgtctttgttacgccagtctttcagtacttttacatatagattcaagaagacttttttgccaaagaaggcctcgatgtccagacgggcttcggtgcctacctttttcaaggcttccccttggttgcctatgataatgcctttttgagaagtgcgttcaacataaatgacagccatgatgttgatacgtttgtcttcctctttgaattcctccacttccacttccacggaatacggaatctccttatcatagtttttcaatattttttcgcggatgatttcattgacaaaaaatctggctggcaaatcggtcaaatcatctttaggaaaataggcttcgccttccggcagcagctctacaatccttttatataaattgtcaacgttgaaattttcttttgccgacatcgggaagatctctgcgtgcggaattaattctttccatttgtcatacaaagcctccagtttttcctgattggttaaatctattttgtttaacaccaataaaaccggtacttttgatttgcttactttttcaacaaaatccatattcttttcaatattctccacgacatcggtgacatagagaataatatcggcatcaatcagtgccgattttgaaaattccagcatatattcctgcatcttataactgggtttcacaacccccggagtatcggaaaaaacgatttgatactcatccgtattgacgatgccttttattctgtgccgtgttgtctgcgacttagaggtaatgattgatattttttcgccgaccaatcggttcatcaatgttgacttccctacattggggttgcctacaatgttgacaaatcctgctttatgcatacgagtgtattaataaattattttcttgctgcaaagatagtgattttcgcgttaatattcttacttttgttgttcgctaacaataaatttgagcaagatgtttatcgggtcgttgaaaaatacagaaagagcagagactttacaccctcttttcaagaaggtgtttgactatatcaaatcacatgacttaagccggatgcctgccggaagaatcgatattgacggcgacaacgcttggatcagtgtcagtgatgtgcagggtcgcgaagcggaggaagccaagctggagacgcacaaccgatatatcgacattcagatgccgatggttggtagcgagacttttgggtggaaagaaagagggcttttgagcgaggagtgcaacggtggctacgacacaaaaaatgatatcactttttatgacgataaaacttttttttattttacgctcaaaccgggagatttcggtatcttttttgctgaagatgggcatgcgccttgtattggccaagggttgataaaaaaggtggttgctaaggtaaagatttaatactcacaatgttaaaaacaattttaataactaaaaactaaaaaacatgaaaaaagtagttttgatggctgtagcacttttgatggtatgcgcagcaaaagcacagtttagtgccggtgattttacttggggtgctaaggttggtttgaatgcaacaaacatttcaaactttgatatgaagaacaaagcaagtattcatgtcggagcttttgcagaatggaatctgagcgactttatcggtttgtctcctgagttggtatattctcgtcagggagcaagagaaaaagacggtgatgtaaaatacaaattgcgtgtaaactatttgaatattccggtattgtttaaattttatgtactggaaggcttgagtgttgatgcaggtcctcagttcggttttgctttgaattcaaaggttaaagtaaaagatggcgatagcagttctaagactaaagtgaaagacgtaaatacatttgatatgagctttcctatcggattgtcttatacttacgaaggtttgattttgtcagcacgttacaatatcggattgacaaatatgtggtctaaagatgattatggtgtaaacactaaaaatcacgtattccagttctcactgggctatcgtttgagcgatttgttctaagaaatacagattcattagataacggtaaggaggtcttcggacctccttattttttttgtcttttcatatttttttcctcgccgtttctccctctttttattatgtcaaaactatgtcattcttatatcaaagataatggtttgttatctttgatatatagttgtcttatatttgagatatatttgagataagaataagtgggaggaaggagggtggggagagggatggagaggggggaaatatcgttgtaggagaggctggcatagttccttgtcattttttgaggatagatgtatggacgaaagatgtttttgtttatctttgcctcggttgtgttggttaaatatttgatatataatattttataaatatttatggagacaaagaaaatattagacaaggccttggaaattgcctataaagcacatgccgggcagttggataaagggggaaacccttatattttacatccgctacgggtagcgttgcattgtcggacagaggaggaaaagatggtggcattattgcacgatgtattggaggatacagcggtgacgttggaggatttggagcgagagggatttccagaggaggttctcgaggcagtggagtatcttaccaaaaaggatggtgaggattatcaaacgttcataaagcgagtgtcacataggactcttgctatccgggtgaagttgcgggatttagaggacaatatggatgagtctcgcttggggggcaaaaagcattggaagatggagacttaccgggaggcttatgactacctgtacaaagagttggaaaacataagtaggtattgaaaaagaggaaaggataaagcgggaatgcctccacgcttttatatgtaaaattaccttttttaggaggtagaaggtgtaaaaatttaatagacatggtaaagtatggttcgttgatggaagctttggaaggattccggggaacagaaggaaaaggtgttgaagtcctagaagggcaatttagggaattggcagaatatttgttttatggtgggtacttctcagtaaacgggaaaagaagggtatatttgagagatttagagttttattatcacgaagaagaagggagtgttcaggatttaatcatgtatcaccgtgatgcgaaaagtggaaaaaagaaagcttattttccgctgggcatgttgcatacgcaccagtccggggtggatatcacattcgagaatgaagcgagaagataccgggcggcagtattggtgagggggtataacgcaatggaagcgggtgaactcccgggtaaggagtatgacaagcattcgacccatctgtatgatgatttgtttatggcatttccgttggtagaggggatacacattgagtggatacatgaaccggtgcaggtggatggttatgagaagatattgcaagacgtgaggatgaatgtgtgcgaatatgacgagaagggttggaaacgggtgtttgaggagtcagggcaaaaaacggagaatggaaagtattacaggatatgcggatgtggagatttatcagggatatagattgatatggggctgttgaacgacaaggagacagatggtgtttatttctcggcgtggctgaaacgggacttcgaagaggtgtataaggtggtgtgtaaggtgttggatcagtacggggtgtggcacggggtacttgagggaacgcaagactattggtgtagagattatatgccggtgcagacagccaaggggcaatttgtgcgatatcggtattgccctgattatctgagtaaggggctgcagcaatacatgacagatcccaaggatgtgtgtgacaaattgcgggaggcatggtgggctggggtagtgtggcaggagttagagctggtggtggatggaggtaatgtagtgaaatgtggagatgtagtggtgatgacggagaaggtatttgcggagaatccggatgtgcctcgggggaaggtgcatgggatgttggaggaggcgttcggtgcggaggtgttgtttttaccatgggattcagaagagaagtatgggcatagtgatggtgtggtaaggtatgtgggagatgggcgggtggtgatgacgaactaccgagattttgacagaaaaatggcggaagagatgtggcgacggttggaacggcggtttgaggtcgtggagttggcatattcgtcggaacggacacacccggattgttgggcgtatgtgaatttcctacagacggagcaggtaattgtggtgccgggattgggaatcaaggaggatagagaagctttggaacaattgagacagctgtttcctgagtacggggaacgggtggtgcaggtggatgccagaccgttagtgaaaagaggcggggcatggaattgcatatcgtggaatgtaaaaaggtttaaatgattgttcgagtatggaaaagacgataagtccgaaaagggtgaagatggcggtttataatcgaattgattttgaattgcctgaggaattttgggaggaaatcgatacagcatttgcagagtgctggaatgaagttatcggatatgggaatgatgtgtataaggagacgatagtggggtatattgtgggacatttgaaacggaaacggataatgctaagcgtggataaggtggataggattgtggacattattttggattatattaaaatggtgggaggttttttggatgaagatgctgtggtaattccggtgcagccgaagagggataagaaagggaggtttttgaagaaggaggaagagcaggacagaacaagggagaaaatcctccagtttctgggagaacataaccagggaagaaaagaacttttgcaacgatttttgtccagggaagaatttgaaaagcaaatgaagagcaacaatcctgccggttatggggggaaattgggagaaggggatgattggatcagggaggcaaagagacgcaagaaggagttgctgcaagaggcgaaggagatgttgaaacggcgtgcgtcaaacgaggagatgtgcaagatgcgcgaacgatttgccgatgaggggataggagtggcctatttggcgcgattaggctggaaatctcaacacggaaagcttgagaaagaagagaatgagggtggtgaagaaaatgttgcacatcattcaacagaggaggagctacaagagtttatccggaagaccaaagagtcacaggaaaacctgcaacggctgatcgcattgggattggagttgccggaaggagaagggaaaagacaacgacgcaaaagaaggttggaggagttgggaaaattgcacttaagacaagataaataaagctagtaaataggatgaaagaaaagaagaatataagaagcatcagggatattacgacgatgccaagtggaatgcacacaagacggcggtagtgataaaaggaaattttcataaattcaagggtaatggtgatttgcgagattttcttttagataccggagacaaggttttggtggaggcaagtccttatgatacaatatggggtatcggtatgaaagaagataatccggattgtttgattcctcgtaattggaagggtgaaaatctgcttggtttttgtttgatggaggtaagaaatttcgtgcgaaaagtttaaatagaagcagaaaaatatctgatatttttgatttgggaatcacaataacgtgaaaagattattatctttgatgaaaacctccggcaaggcgaaccgaaattagaaaatagccacaagttgtggtacaattatccccaaaggctatggcgcaacttttcggagtaggagtttctgctatcagtaagaattttattcctaaagaataatatgatggataaagatatagaaaagaaggaaatacagcatatgtcagatgctgtcaatatactgaaagctgccattttgcaaagccaagcacgcgctgctaaggctgtcaaccaagagcagttggctctgtattatggtatcggtcgctatatatcaaacaatactcgaaataagaattggggtggtggcatattaaaatccattagtcaacttctgcgagatgaacttcctgggttgcgtgggtttggtgagacaaatttgaagaatatgcgagctttctatgaggcatggaattgcatagaatctaattcgtcagttatgactgacgaattaggcactatttcgtcgattgatgataggatagatgttcaatcggttggtagtaagggtgatacaattcgtcagttacgactgacgaatttagatcattttccaattgtaccgttcctaagcatcagttttactcatcacattgtcattctatcacaagcaaaagagtggaatgaacgcttattttatatacaatatgctgctgactataaggtgacagcggaagacctggtagatatcattaagaaagatttatatcatcaccaaggtgagatgcctaataattttctctctactattcctgaatataaacaggcctatcgagctattcagatgtttaaggatgaatacttgctggactttataaatgtggaggaactgggcatgcgggatgaagaagtggatgaacgtgtcatagagcaaagtatagtccacaacatcaaaaattttatcatgaccttcgggaaaggttttacctttaatggcagtcaagtgcactatgacaagttgggtcatgaccattggatagatcttttgtttttcaatcgcgatttgaggcgtctcgttgtttttgaactaaagaaaggcaagttcaaaactgcctacttagctcaactcagcagttacttgcgtatcctcaacgatgatgatcgccgcgaaggagaggaacctcctgttggtattattctctgcaagagtgctgacaaggcgtatgtggaatatatcatgcaagattttcgtcaacccatgggtgtcgctacgtataaaacggcagatgaaatcgatgcagagctgatgaaggtgcttccacctaaagaagagctggagaagctattaaatgagtgacagatctaaatctttttatcctatgttaccgttacatcaagcatacgaggttcgtattgtgtaataagcaaattttaaattgacattataacacctaggtaagaaatttcgtgcgaaaagtttaaatagaagcagaaaaatatctgatatatttgatttaggaatcacaataacgtgaaaagattattatctttgattgcgcatataattaatagaagatgttaaactttgacgaatacctccagcaaggcgaaccacaaaaacgagaaaaaagctatgcttggcaaacagcaataggacttcaggctgtagatggcttgaagccttccgaatatcttatcgagactgctcgtaagcatattgagggagatataaaagggagtctgtgtatttggagcgattcttctgcaatctattaatgggagaaaataatgagttgaggaatcgttttatggtagtcaatattcccgaaaatgtagaaatatttaccccgacaagtaccccgacaagtaccccgacaagtaccccgacaagctcaggacatcctcgtcagaaataccttctgacggtgaaaggtttggctatatataattccaaacaataggcatggactggattatacagaatttgttattataattatttatatatcatgaaatacaaatatacacctgaatttatcgatgaattggaatcgaatgaaatctttgttttcggaagtaatctggccggaatgcatggtggaggtgctgcacgttttgcctataaacggtttggtgctgtgtggggacaaggagtgggtttgcaaggacaatcttatgcaatcccgaccatgcaaggcggagtggaaacaattcgtccttatgtggatgagtttatagcctttgctaaggctcattctgaatatacattcttggttacaccaatcggatgtggcattgccggatttaaggaagaagaaatagctcctttgtttcaagcggcattggaggtggaaaatattgttttgcccgaattttttgtatctttgctatcgtaaaacatccatagagttacctttaggtacaccaaccgagttgtcagctgcggtggttcattggggatgtgaattgttgaacaattaaaaactgactgatatgtataaaagtatggttttgaatgaaccacatgcatctgtggaagggttgtttgatgcggataagagtttttggtcgattgatgctgattttttgaataatgtcgtttataagttgacggactggcatacagattatttgtttcatggtcttctagatgatcgtattcagactgtccgtttcccttattcccgatttgttgttgatgctgaacgtttgtgggatgatccgctggaacagtgcggacaaggtattgtgtataaaagttttggttgttatcgtcgagagattccggtgcaagccgagcaaatgcttataggtttgtggttatggcatcaacaacggttgaaacgagctttacgggaggattctctattattggactgtcactctttcccagaagaacagagtgatgtggatatttgtattggttttaacgaggattggtccaaacccagcaggcagataatagagtttgcggtaaattattttatggataaagggtatcaggtggggatcaatgctccttacagtaattcaatggctccggattgtgggtttgtttatcattctatcatgttggaggtgaataagaaaacttatctccaatcgaatagtacgcttctgcgcgataatggattgagggatgatatccgggaatttatgacgtgtttgcttgattgaaaatcttttgtttgtcggtatctcttgattgattggtagactatcggtaagagaaagcaatggagatattggtgccattcgaaaaacaagagcaccttattgtctgaaaccaagcaataaggtgctctttattttgtgaatttttagtatttaaaactgcttcctcctaggaattcgcgtatgatggaggtgggaggaatttcccggggtggtacgacgcggatgtaggaaaggaatttcagcagacgcaaggctttggagtgttcgggatgttgttgggtgacttcccggagcaaaggctctgcctgtagtttcaaggtgcccaattcgtaggtgagggcagagttgaagatggcatcggcttcttcttggtaggggacaatgtgcttttgttcgcctagcaggacgctttcccaacgtttcagggtgtcgagtgctgaatagttgcggtatttgtagtcgcgcaccattctgcgaagcagacgattgtctgacgggtttatcaggttgtggttgtcaatggcgatggatgtcagggcggaaacaaatattttaaatagtgcttccggtggcagtaactgggtcagtttggggttcaaaccatgaattccttctacgatgatgacattttgtttggtgatgcgcaatttttctccgtcataatagcgttgtccggtttcaaatgaaaatttcggaatttcaacttcttctccggccagcagacgttggacgttgtcggtgaaggtggctatgtcaagggcatcgatggattcgtagtcgtattctccgttttcatcgcgtggagtcagttcgcggttgacaaaatagttgtcaagcgaaagattgatgggcttgatgcagtttaccatcagttgtatggcgagtcgtttgccgaatgttgtttttcctgatgaggagggaccggcaatgagtatgacttttacatgtttctgacgggctttgatttggtcggctatttgcgaaatctttttttcgtgaagcgcttcgctgattttgatgatgggacctgcaaatttgttttcaattaatttgtttaaactaccgatatctgtggtttcaagaattttaccccagcgtttgtattcgctgaatacgttgaacagtttgtcttgcgggataaccggcagcaactcttgcggattgtgtctgtccggcaggcgtagcagcattccgtttttgtacggtatgaggtcgaatgttttcagacagccggtagagggagccagggtcccgtaaaaatagtcggacaatccgtccaaatagtaaagggaggtatatagttttccacgggtttccattaaatccgctttgtctttgaagccttgtttgcggaatatttgtaccgctttctctgtcggcacgtcttcgcggataatgggaatgtcggcatcaatgattttttgtatttcattccgtagggagtctacaatttccggctccagggataagtctttattacctaaccgacagtatatgccgttggaaatgacgtattctgtccgaagggattttcggggaaagatgttggatacggctttgtagagcacaaatatcaatgaacgggagtagacactgtaaccgtctagggttgtgatgtcaataaagttgattttcagaggattcatgacgatatattgaaggtctttcaactgatggttgattaaggcacccaatatatggttatggttttcgggatatatgattttttttatctctttcagtgtcattcccgcctcaacattgtagttgcatcctgtattttcacaagaaatagttatggttttcatcgtttgtctattattaataatggctaagttaccattattaaacggacaaacaaataatataccaaaataagcgggtaaaaagggacttatttgtataattccttgtttttaggtatggcaatgtgatatgttttgtgtttggaattgtgtaaatcgggtttgcgcaaccatggattgaagcgtttcagtgtcttgtaggtgattccctgttggtgggcaaagtctgcccagcttttgacggtggtgtcaatggctacggtttctatcggttctgtcgggtaggtgatgttgatttggaaattgtatttttcaggatgggtcatgatttgtttaagggccagaatacgatagacatagcgttcggtttcttctcctaagagaaggttgtaataattttgctctttctgtattttcatctgtttaagtaaaaatcctgtaccggcattgtaggaggctgctgccaatgtccacgacccgaatttgttgtatgctctttttaagtattgggcagcggcttgggtggatttttccaagtgataacgttcgtcgatgtcattggagatttccagaccgagttctttgccggtggctttcatgatttgccaggtgctggctgctcctgccggggatacaatcagtggatcaagacggctttcaatcactgcaaggtatttgaagtcgtccggaatgttattggctttcagaatcggttcgatgatggcgaacacccgcggtgcatttttcaggatttgtgttgtatgtgaatgcagataggtgttgacaatcaattctttttttaaagcttcttctacatcccggcgatgaacggggactgtctcccctgctaaatcaatggttgccggcatgaaaatatcgctattgaccggagcatctaccgggagagctatccctccgtccgattgggatgttgccgggtgaaagtagtgtgtataaataatagctgcagcattggcaacggtaatgacaatacaaattataagcagaatatttatttttttcatagtatatatttttgagggttcaaagttatcaataaaagtgaaagattgaaatagtgttgtcgctttgtgatttgtctgtatgagaatgcagaaaattagttttatctttgtccttgaaaagacagacggaaggatgaaagcttgtaagaatgaggaatggttgaatgattttaaacgaggaaaagagtatgcttttcgtgtggtatttgatgaatactacaaggttttatgttattttgctttccagatcataaaggatgaagcggttgccggtgatttggttcaggaggtctttgttaatttatggaaatccagaaaatcaattaattccgatgcacatttgcgtttgtttttgtaccaggctttgaggaggcgttgtttgaattggattcgtgacagaaaagtggaggctgagtttagagaagcttaccatcaattggcagatgaggtggattttaccaatcgtgtagtggaggaggaaattcaaagaattgttttgcagaaagtggctcttttgccaagtgagcaacgccgggtggtggagttgcatttggccggtaaggataatgcggaaatagcagaaatattgaaaatttctgttaataccgtccgcacacataaagcgcgggcacgcaagactttaaaagattgttttgaccgtctttttatgtttttgtttctaggtggaatataatttttaattttttttcctcttcttgtcgtcttgttatgggtttgtcgtgttttataataaaaagaatacgggaatggacgttgaatacaaaatatatttggttgaaaagtttttgaatcactctctgacagagcaggaagagaaggagtttcaactgtggctggatgaggatgacagaaataaggatttgattgaacgtctccaaaaaaatagaggaatccaagagcggatggattattttcagcgagtagatgaggagaagggatgggctgaaattaaatgtcaatgtgagtttaagaaagaaaagtggctctttttaagaaaagccgttcgttatgctgcgatgattgctgttatagcaggagcttattggttgctgttaaatagagaatatcaaaaggtggaattggcggatgccgggaaaacagaattgcagaatgcagaaacacgggttgttgtggagttggctaatggtgagcgtttggctttgggcgattctttggatttgaagcagggagaatttgaaggaggaaaatttgcagaagcaagggatggattgaagtttagtgcacaaacggttgaacagcaacaggctaaaatgaatcgtgttgtggtgcctcgtggaggagaatatcagattgttttgtctgacgggactaaggtttggttgaatgctgatacgtatctggtgtttccttcggctttcgacaagcgggaaagaatggttgaggtgcatggagaagctttttttgaagtggctcatgatgcaaaatggccgtttgttgtcaagatgagtaacagtatggttaaagtgttggggacttcatttaatgtgaatacttatgagcaacggaatataacaaccttggtagaaggtgctgtggagttggcgctggaacagggaaaataccgtttaaaacctggcgagcaaggagtcgtggaggatggtaaggtggcagtagcctctgtagatgtccgcgagtttacatcctggaaagacggaatttttatttttcgcaaccgtcgtttggaagatgctttgacggtgttggctcggtggtatgatttacaggtgttttaccagaatgagcaggtgaaagacttgcattttacaggtaatattcgaaagcatgctgatgtggggaaattactgcatttttgggaagaaaccggaatggtgggttttgagctaaagggaaagacattaaaggtttttgagaagtaaaataaattaaaatcagtataaatagaaaggtcgccgggaaccgcaacttcccaacgacccaggtagaaatgttttattaaaacacgaacaaatctatgaaaaaaaaacaacaattacgcttcctatggaatcgtacgctaaaaaaaagtttgagggtgatgaaattgacctgtttgttattattggtgggtattctccatgttagtgccggagtaagggctcaggagggtgccatatctttaaatgtgaaggatgcttctgtcacagaggtgttcgatttgattgagcagtcatctaattatacgtttatgtataataatgagttgattgccaatttgaataaggtttctatttccggagcaaacaagcctatcactgaaatcttgaatatctgtttgaaaaatagcggattgtcatggaaactgatagataatgtgattgtcttgaacagagccggtgtgcaggctcaggctcctgagatgattaaaattgaaggtgtagttaaggacaaaacgggggaattcttgccgggtgtgtctgtattgttgaaaggtaccacgttaggtgctgctacagatatcgacggtaagtttacattgtctattcctgaaggccagcaggtagttctggtgttttcatttgtcggaatgaagacaaaagaggtgccttataaaggagaacagaaattgacgattgtaatggaggaggatgccgaagagatggaagaggtggtagtaaacggttactttacaaaaaacaaatccagttttaccggtaatgtggtggcagtgaccaaagatgaattggctaaggtctcttccaataatctgttgactgctttgcaggtgttcgacccttctttccgcctgaaggaaaatacagaattgggttctaatcctaattcattgcctaatttccgtattcgtggtaattccggttttggaacagaggctttgtctgaatctaatttgaagaatgaccctaacttgcctacttttatcttggatggttatgaggtgagtgttgagaagattttcgacttgaatatggaccgtgtagagagtgtcactattttgaaggatgcttctgcaacggctatttatggttcgcgtgctgccaatggagtggttgttgtcacgacgaaggctcctaaatctggagagctgacagtttcttatagtctgaatttgtctgttgccgccccggatttgtcggattatcatttgttggatgccaagggaaagctggaggctgagtcgttggccggcagatatactcattctgatccgaaatatcagcaattattggatttggattatgctgagcgttataaaaatgtacagcaaggtattgatacttattggttgtctcagcctttgcgtaccgctgtaggtcatagacatacgttgtatgtggaaggtggtgatgaagctgtccgttatggaattgatttaagttatcagggaaatccgggtgtcatgaaggagtctgcccgtgaccgtgtcggattgggatttgtattgtcgtacaatttgaacgataagtttttattccgtaacaagttgtctgtcgataaagtgaaatcgaaggaatctccttatggtacttttagagaatatgcagaggctaatccctactattctccttataatgcagatggtaagttgcaacaagtttatgctactcatatggcttattctcaaccattgaagaatccgttgtatgaggcttcgttgaataatcagattgcttcggattatatggagtgggcagataattttgatattgactggtttattaatgatcactggcgtatgaagggacgagttgcttatacagagcgtcgtgataataataaggaatttaaagatccgagatcaggagtttatagcggaagtgattatcagacaggagacggcgtactgaaaaaaggacgtgcctatgtgtatgaccagcgcagttcgaatgtggatgcgaatttggtgttgacttatagcggacagttcggaaaccatttcttgaatggagctttgggtggaaacttaatacaggataaattttcgaatgagggatatagcgttatcggcttcccctccggcagtatggattatatttcgtttggtaaggagtttgaaaatcagacagcagaaggaaccgaaggggtttccagattgttgggcgcatttttgaatgtcaactatacttggaataatatttatatggtagatgtctcaggacgtttggacggttcatctcaattcggttcggacaagagagtggctcctttctggtcggcaggtatcggttggaatgtccacaatgaaagcttttttgaatcggcaaagtcaattgtcaatcatttgaaattgtcctttaatgtcggttcgttgggtaaggcttcttttgaaccgtatcaggctcagacaatgttccaatactacaaaggtcagtggtatgccaatggtgtaggtgctactttggtgggtatgggtaataaagacctttcatgggaaaagacaaccagttacgatgcgaattttgaaattcagtttttggatagccggattagttttgacgctacttattactataagaagacaaaagacttgttgtctgatattactctgcctttgtctaatggttttgagacttataaagataatttgggcgtgttggagaataaggggtatgagttgtcattacggggttggccaattcgtacgaaagatttgaatatcagtttatatgctactattgctcataacaagaatgttattaaagagatttctcagggcttgcagagctataatgatagtatagataaagaccaggcttccagtgcagaagaatccagaaaaccgcgggttcaatttaaggaaggacagtcaacaacggctatttatgcagtccgttctttaggaatcaatccggcaaacggtaaagaggtttatttggaccgctttggtaatacaacttatacttggaatgctttggataaatttgtatgtggagatacagagcctaaagtatccggttcgttcggtttgaacggtgactataaaggatttaatttgagtttgaactttttgtatcagtgtggaggacaggtttataactcgaccttggttgaccgggttgagaatgccaacttgcgtttcaatgtagataaacgggtattgtcagacagatggaccaaaccgggagacaaggcattctttaaagatattaaggataattctgtgactcaggtgacttctcgctttgtggaagatgaaaattctttggagatgaaatcaatatcattgtcttatactttttcaaaagaaatgttgaaaaattgttttatggacagattgaaattgactttcatgatggaggatcttttcagagtggctaatgtaaagagagaacgtggattggattatccatttgcccgtacattcaattttggacttcaggttcagttttaagtaataaatgaagatagattatgaaataattgtatcagaaatataaatcgattattgtagctctgctgataggtggcatgtcaacaagttgcagttggctggatgtcactccgcaggctcaggtgaacgaagagcagatgttttctaatccggaaggattcgagcacgttttgttgggaatttatacctctatgactcgtgagagtatgtatggtcaggatatgactttcggtatgatggatgtcgtggggcagtattataatatttataaaaatcaggatcacggatattattatatttcccagcttaattatacgcatgagcagtttttgaaccattcgcgtcagacttggttggattgttataattcaattgctaactgcaatgtgttgttggaggcattggacgggaaagaatcttctttctttgagggtaataaatatcgtctgataaaaggagagactttggcgttgcgtgcttatttgcattttgatttgttccgaatgtttgctccgtcatggggaaaagcgaaagatgtattgacaatcccctatgccgattcatttaccaaaaaagattcatgcacagcttaaaggtgaggaggttatccgtaaagtggtggctgatctggattctgcaaagaatctgttgaatggcattgatccggtgttggaaggaggctataaggtgatggacaatcattttaattctcctcaggaagccagcgatttgttcttgtcatatcgtggttatcgtatgaattattatgctgtattgggattgttggcgagggtgcatttttatatcggtagtaacagcgaggcagctgcttatgcagagcaggtgattacagcaaaggaagaaggttattttcagtttacgtcggaaactgcttttaagaatcctcaggcaagtcgtgatgtgcagcaaatgaacgagttgttgtttgcattgaacgatgttaaggttgtagaccgttggttcagtttgagcaactctgctaatactgctttccgtattgttaataatagttccttttattctaaaggagattttcgtctttatttattggaaaatgctgcagaagaagataagactgcttctttgaaatatgcccgcttgagtgaaaacgcagctaatactaacaataaattaccgatgttgcgtatgtcagagatgtatatcattgctgcagaggcaggatatgctacagataaaacgaaagccatcagccgtttgagcgagctgaagaccaatcgtggcgtttcgatgaatatgaccggttattcgtttgaacaattgcaggatgagactttactggaggcgaagagagagctgttgggtgaaggtcagttgttttattggtataagcagcgtaatttggctaaaatcaaacgaggcaatgaggtaatagatatgccgatagagaaatatactttccccttgccatcaactgaagttgaatttggcgatagagtgcaaccttaggaattgttgaatataaaaatacgagatgatgaaaagcattttatatatattactgggtgtatgtgtcctgttgacggcttgttcgaagagtgactactccggttatgatgctgataattatatttatttcagccaggatacttcgaatattacaaccttctcttttttctttgctcaggaagatgaaggtattgtaaaattgccgttggaaattattgctccggtggtaggagaagaccgggaatataagattggttttgtcggcaatgaaagcacggcttcgctgggtgatgattttgtattgccggagggtaagttggtgtttggtgcgaatcgcgttactgacactttgcagattaaagttttgcgtcctaaagcagaaaatcatgaagcagtggctgtttttgaattgttgccttctgcagactttttaccgggcatgcctgagcgagtaaaagcaagggtaatgataaccaataagatttctcagcctgcatggtgggatcaatggcatcttacttcaggattaggtacatacagtgatttgaaatataaggcattttatgaatgtaccaaagtgtctgatttggattacaagcatagagaggatttgagtcagtcagaggtgcgagccttgattctgaagtttaagtattggttgaaagagaatccaagggaggacgtaaacggtccgatggaagtggcaatgaaaggataacagctaagacgataatatgatgaacaagttatttatatattttggtttggtagcggcagtattattgacaggttgctacaaggataagggaaatattgattacaaacctttgtcggatgcaaaaattagcggaatagggtattcatatacactatatttgggggataaatggaatgtacctgtagagattgagtattcattggatacaccggaagaggtggcttatttgtggaaggtgaatggagatacgattgccaccaccaaggacttggatgtgactgtttctttcccgttgaaagaaaatatgcctgcagagtatgtggtgacggatttatcgaatggagtccggacaattgtaccttttacggttacagtgaaatctgaattctctcagggatggatgattctgtcagagcaggaggaacattcggtattgggatattttagagatggcgacggtcgtttttatgcggatatttacaatgacattaatcaggagcatttaagtaagggtgcaactcgtctggtggagcattttttgagtccttttgaaccctctgtcacagctttgaccggtcaggtatttgtggcttgctctgaaggtcctggttattctgtagagttggatggtgatagctttgagcgagtgatttatacgaaggatgaatttgttgatgctactccggcagatttcagaccggaagcttatgaaagtatgccttctgtagaaacaggagagggttttgattatcttattagcaatggtaaggtgtatacgcgcgcgctgtatgatggtatgtcatttcaggatggagagtattccaatattccgtatgcttataatggaggcaattataaattagctcctgctattttgcgtggaaatataattttgggagattatcttttgggttttgacaatgtatccggcagttttgttcaatttgctgacggtgaagttttgaccttaaatccggctgcggatatggcaggtggttttagtatggtgaatacgggattgacttggatagatggaggaacagttgctatctttaatgatgtagaggggacctttgatacttatgtaacatttatgaaggataaagatggaaaagtacaagtgatgaatttccaagttatgcccaaaatgttaacaggtagtttcgcttatatgtcgatgatgcagatgccagttagggatactgagggtaatcctgttgtatggggaggtaatattatcaatgcgaatacacgttttgcttattgcgataagggtaatattttgtatattgcaaccggaaataatttatatgcttttgaccatgcggcgatgtctttgaggttattgaagacttatgacaaaccgattgtagaaattggcatgaatcgtcttaatcaaatggagttgggtattgcctttgacaatggcaatggtaccagtgattttggtgtggcagatgtgtcttacatcggtggcggagagattaagggaggaaagtactataccgtggaaggaaaagtaaaagatatcctttataaagttggtaatcagttattgataagtggaatgaattaattgatatgaaaaaatggatgatgttgtcaggtgtgctacttgctttgggggtagcctcctgtacacctaagagcgaaggctttacagttaaaggagagttagcggatgcgactgaaaattttcagttgatggtcagtgaaaatgttccggtgatgaaatcctggttcattgataccattgaagtagtggatggaaaatttacctataccggcaagttggagcatccggaaatgatggtgttttctataatgaaaggcggagattttctgggtagttttggtatcttgatggataatagtgatatcaagataaccggtagtatgaaagatttgtcttccatgaaaatagagggtggtaaggctaacgatgcttttaatcggataatggagcagggcgaccctgtatttacggcatttaatcaggtgcagcaaaaaagaagcgaggcttttaaaacagacaaacaactttatgaagccttgactgatgagtataatgcagcttatgagaaggttaaggaacatgtattgagtgccgagaattatgctaccaacagtgcgattccttatgtcatcttttctaattttaatgtgactcgtcctgctatgctggaggaattattgacagctttggattcttcacaatatgatgacccttatgtcaagcatctatcagctgatttagctcgtgaaaagaaagtcggtatcggagctgttgcgtttgattttgaattgccggatgctaacgggaaaatttttaaactatccgattatcggggtaaatatgttctggtagaattcaccgcttcatggtgtggctggtgtaagaaggaaattccatttttacagcaactttataaagaaaccaagggtaaagatttcgagatgtttaccatatatgtggataaggacaaagatacctggttaaatgatatgaaaacacatccgttgccttggaccgtgttatgtgatttgaaagcgttggatggtccggctcctaaaggttataatgtgcatggaattcctgcaatatttttaattgctccggatggtacgattaaagcgaaaggattgcgtggagagcaaatgatcaagacggtaaaggaattgttggagaaataaataaatgtttgatataaatttaaatactggtgggaaaatatttctgtcagtattttttttgtatatttcgtcaatatttgaaacttataaataattgcttatgtttgattttgataaaataatagaccgttgtgatacagatagtgtgaaatatgacggagtatatgaggaattcggttgttcggacgtgttacccatgtgggtcgcagatatggattttgaggtggctccttgtataaaggaggctgtgttagagtgtggcaatcgaggtgtttatggttatacatttcgttcgcaggaaggaaaaaaagctttttgtgggtgggtggagagaagacacggatggaaagttgaaacttcatggctctcctctagtccaggggtagtgacagcattggctcttgcagtaagggcatttacaagggtaggtgataagattttaattatgactccggtgtatccgccatttttttcagtcgtacaaggaaatgccagagagttggtatgtagttccttgcatagggagaatggacgatatgggatagattgggataatcttgaaacagggttgaagagtggtgtgaaaatgatgattttatgtaattctcataatccggtgggtagggaatggactagagaagagttaaaaaaagtaggagatttgtgctgtaagtatgacgtgttgatattgtcggatgaaattcatgctgatttgacattacctggtttccagcatactgtgatggcatccgtatccccggaaatagcagaacgtacattgacggcaatggctccgagtaaaacgttcaatatagcaggtatgatgaattctgtagtcatagcttccaatccaaagcttttagagcgttataatcgggaattgttttcgttgcatttggattcgggaaatattttcgggcacgttgctttgaaagctgcttatcgttgtggcgatgcatggttggatgagatgttgcggtatattaatgttaatattgatattgtcgaaaattatttgaatagcgagctaccggaagtgaagatgtatcgtccggagggatctttcttattgtggttggatttcaatgaaacaggattgacacacgaagagtgtggaaggcgtttattgcaaaaaggtaagattgctttgaatgatggtttgacatttggagaagagggacgaggattcaggcgtatgaatatcggatgtccgcgtaaggttgtgcaacaaggtttggaaagaataagccaagcgctaaaaagagagtcttagattctctttttatgccaggctgaataacgtatgtaaaaataagatacgattccgattagcaatccataggtgatttcacttgtccaaacaagggctacgtgagtgccgatatatgatgcaaaaaaccaaattgaaaaggtatatacaattagtaccccggtttccaatataagagcatatatggtgttgccagtacctgaaactgcctcaaaaaatggcactccgattcccatggcaacggcagctccgcagatgacaaacagagagggtatggaggctgtaattaaagatgtgtcattcgtatagatagatagcactgtttgagggagtaacagacagcaaattaaaacaggtaaaatagtaactaagccttgtcctatagttttgaatagtgtaggcatgacttcttgttgtttgccttctccaattagtcggctggttagggtgtttgcagtcgctccaaaagcgaacactggtatcatgatgagcatgtatacgctgcggataatgccggattctgcaataggtccttcccccatgtgttctacaaaggtaaaaaatataaaccaagtgccgaaagatagtagtttctgtaccatagtagggaatgccaatttaagcacagctttcattagccagacttctagtttatgaaaacaaaataaagcatacgttttaaggggaagacgaagtagagtgtagcctgtaaagaatatcagagcagatatttctgcacacacagaggcgagagcagctcctcctatgcccatttccggaaatccccatttgccgaaaatcaaggtgtagtccagaaagatattcacaactgccattaatacagtagaaaatgcaatcacttttgtattggatagtccgatatataaggctctaaacaaaaagttgaaacagacaaatataataccataatgcctgtagtccatgtattccatagatgcacggtatatgttgggcgattgtacaatctttcccagaatgtctgcattataattgtgttgtactaaaaacagacaggaagatagtagcagaacaaataataatccgtgttcaaatattacaccgattcgttctagacgcccttctcccaagcgacgagctacaatgatttgtataccgatggaaaatccccatgctaatgtcgaatagacataatagtatatacctgccatcatggaggctcccaaagcgatattactgacacgcccaagaaatgctgtgtctgtcagtgcgatgagcgtttgtgctaaattaccgaatataatcggataagctatcatccagatagcttttttggatatggaagaatgtgtcatttttacaattaaaatgcttcagtcatattcatatatataccccatttttgtccgggttctttacctatatcaagtcggaaattctttcggggctgtaattggattcgaagtccaacaccataattaagtttccatttgttccaatcggcaggtgtttttccaattgttcctgtgccgacccagcctacgacaccgaatttggaccaaaaagctccacgttcataagcttcttgtgacataaacatgtggcggtattcgacaataccatatgccattgatttgtctcggtattttccccaggtgtagcctcgcaggtcaaatggattaccgaatcccgggagttctgtatagggaacattgtccatactaatctgtgttttagccgtccaggcaagtgtgcttcgacgtttgaatacctgtttgaattgacgatattccaattcaatgatttcataattattgttacctcccaggtatttgccatatacggtacccatagcgcttaaaaacattccagagaaaggtgtggcaacgtcgtcgcgggtgtcatattgaagtaaagcaccgataccgatattgtgatatttatttccgaacttgagaatctgtgaattttgtgccatccattccggcatttctttagatttgctgtaattgaaatctagtaacgctccaacatagatatgtggctttacttcccaaacgaagcggggaaagaactgaacgtttgctttatgaaaagtgacggagtcttttccataaagatcgtttaaattttcggccgctttgatttcatcatagcctatgccataaaaattggaaggctctgtacgatacccgtatttgatatagatgcggaatttattttcattgaagaatagagttccagctccggcagcaacaaatgttccgttaattgaaatgttgaatcctaccggaataaacgaccgttggctgatagtgtcttgctgattcatgcgaaaagtcatcagcatggcacctcctatgccaagagatgcttccggggtatatgacggacctcctaaaatagagacccacatctttttatgggctctgatggaatcgcgtctgtgttgtcgttgaaattgttttagttgcctctctgtccattgcctttttataagagaatctgcggaagtttctgttatacaagtatgtccctctgcaaatacagagacggacatccatagtgagaaaaacaggaataatgctttcatagtgtcattgaatatgttgcaaaattactttaaatattgtgttacccgatattttgagcgttaatttatattatctgttaaattcgtgttgagagataatgagttttgaaatataaatgctaattttggactataactcattggagtttattttgtgaatagattttttaaaatatatgattatgacaattgaagaaaaagtaaatgaaggcattaagagtgccatgaaagcccatgataaagtacgtttggaaaccatgcgcaatattaaaaaggtgattttggaagcaaagacaaaaccaggggcaggagatcagattgatgatgcagaatgtatcaagttaattcagaaactggcaaaacagggtaaagagtcagctcaaatttacaaagaacagggacgagaagatttgtatgaacaagaaagtggtcaagttgctgtattggaagaatttttgccgaagcagctctctgaagaagaattgactgttgcattaaaagaaattattgctgaagtaggtgctacaactccgcaggaaatgggaaaagtgatgggtgtagcaactaagaaattggccggtctggctgatggcaaggcaatctctgctaaagtaaaagagttgttggcttaagtgcttttggagggaataaatataaggcggtttgttacaaaccgcctttattatgtcctggtagtttactgagtagtaatttgtattcgtgaataaaattgggtgtcaggagatccttgtcaacagcatttctaatttcttgtgcactccaaaaccggccttcgtccacttcgtcattgtcaatttggatgtggtcatagtgtttgcagagaaatgaaaataccaattcccgttcacgtggactttcccaaatatatgaacctagaaattgtgcttccagttttgtgattcctaattcttcgaatgtttcacgtttgagggcatcatccagtttttcattgacgccgatatgccctccgacggcagtatcccatctcccagggagtaagtcttttttcatacttcttttttgtagaaacacttcatgttgttggttgataatgtgaagatgaacaaccggatgtaataatttgcttccggaatgacatacactgcggggagcttttcctgttacttcacctttttcattgacaatcggaagccattcttcttttttcattttatgcatgataattttattgcgaataaacaaggttaaaaaatagctgccgataaggatgtagagtaggggactgctgataaaatcggctattcgctcgggcagaaacaataaggctgcaaatgagcatagagtatgtgtacagatgatatagaataagaaccgaaacattcggcgtattgtttttatttgattctccgaaaagtgcatctctttgcggtatcctgccggcagagtggctgtcaggtcaatctttgaaaaagcaaaaaagccaataagaatgcataagattacttcaatcatagcgggttgcattctagaaagtgcagtgtcttctgtataaatggcaagtactcccggaatacagaaaagcagggttgtccacaagacaattttatcccatattttctctcggatgcgtgttgtgataaattcaatagctcctaatgcgatagctgcatataaaccgatggttggaccccaaaattcttctactatgaaatagatgattaccaaaagaaaagacggggctaagcctttaagtgatttcataaagttactctttttatgttggctgcaaaattaggaaattaatactaattttggcgcataaaataaatacaggagattatgtttaaaattgttgctattatgctgagtggtgtagtggtcggttatttgttaaggaataaaaatttaagctttgttcctcgtctgattaccattgccatttgggtattgttatttatgttgggactggcggttggtttgaatgatgcgatcttgaacaatctggatacaatcggtttgcaggcatttatattgagtgtgggaggtatagcgggaagtgttatattggcttgggttgtttatcgtttcttcttttctaaatcgcaggaatagattttgcatgtttatttttgattttaagttatgcgtggtagtctgattattattggtttctttattattggagtcatttttgctcgttttcattttatgcctgattgggtgttgcagaatgatttcagtatgtatgcactttatgtgctaatgtttttggttggtattagtattggtagcgatacgaaagccttgaaggctttgaaggagcaaaatatgaaaatagcttttgtgcctttggctacgattttcgggacgcttgctgggagtgctgctgtaagtatacttttatctggacgcagtgtatgggattgtctggctgtaggatccggttttgcttattactcattatcttctatatttattactgagtttagaggtgcagaattgggaacgatagcgttggctgcaaatataattcgtgaattgataactcttttgctggctccgctattggttgtttggtttggaaaattggctcccatttgttcaggaggagcaacaacaatggataccacactgcctgttatagcccgtttttccggtaaggaatatgtcgttattgcaatttttcacggctttgtggtagattttacagtgccttttctagtgagattcttttgttggatggctgtttaatgatgatacaaaaaaagtcgttgcaattgcaacgacttttttgtatgtagttaattggattatttcacagtgttcatgtgagcaatcaattccaatactttgtttgaatatccccattcgttgtcgtaccaagataccaatttcacaaagtttttagtcaaagcgatacctgcttttgcatcgaagatagaagtgtgggcatctcccaagaagtctgaagaaacaacgtcatcttcagtatatcccagaatacctttcatttcgccttcagcagcttcttttacagcagctttgatttcttcgtatgaagcttctttttccaaacggaaagttacgtcaactactgaaacatccaaagtcggaacgcggaaagccatacctgtcaatttgccgttcaattcaggaattactttacctacagctttggcagcaccggtagatgaagggatgatattgccggcagcagcacgtccgcctctccagtctttcatagaaggaccgtcaacggttttctgagttgctgtagttgagtgtactgtagtcatcaagccttcgataacaccgaatttatcattgattactttagtcagcggagccagacagttagtggtacatgaagcattagaaacgatagtttcacctgcatatttattgttgttcacacccattacaaacatcggagtgtcgtcttttgacggagcagacattacaacacgtttagcaccggctttcaagtgtgcttctgctttttcttttgtcaggaaaagtccggttgattcaacaacgtattcagctcctacttcatcccatttcaagttcgctgggtctttttctgctgttacgcggatagcctggccgtttacgattaattttccgtctttagcctcaacagttccattgaaacgtccgtgcatggagtcatatttcaacatatataccatgtagtctacgtcaatcaggtcgttgattcctacgatttcaatgtcatttctggtcattgctgcacgaaaaaccaagcggccgatacgaccaaatccgttaataccaactttaatctttgccatttttttattgcttttaagtgtaataaatctattgttgtcaccaaaagtacgataaatttgtacatgctgatgccgtttagggcgaaaaactggcaaaaaaactactcaaacgatttaaaaatcagcagaatgtcatattgtgattatgaaacaaaaaaatcgttgcagggacttcctgcaacgatttgctagttatggatttatgtatgatcggttattttacagtagccatatgtgcaactaaatcaagcattttgttagagtagccaaattcattgtcataccatgcaatcagttttacgaagttgttgtttaatgcaattccggcttttgcatcgaagatgcaggtatgtggatcgccaatgaagtcggaagaaaccacttcgtcttccgtgtaggcgatgatacctttcatttcgttctctgatgctttttttactgcagcctttatttcctcataagtcgtttctttcgccagacggaaagttacgtcaacaacagatacatctaatgtcggtatacggaaagacatgccggtaagtttgccgttcagttcaggaattatcttgcctaccgcttttgcagctccggttgtcgatggaatgatattgccggaagcagcacgtcccagacgccaatgttttttagagtgtgcatctacggtgcgttgggtggctgtaatagcatgtacggttgtcatcaggccttcgattactccgaagttgtcattgataacttttgtcaggggagccagacagttggtagtacaggatgcacttgaaatgatgtcacatccgtcataggtctggtggttaacgcccatcacaaacagcggagtgtcgtcttttgcaggagccgacatgattacacgtttggctccggctttcaaatgtgcttctgccaattctcgggtcaaataatgcccggttgattctacaatataatcagcaccggcttctccccattttaatccttccggttcgcgggtagaagttataaatatatgtcttccgttaatatataattgtccgtccttgatttcgatatcgccattgaaacgtccgtgaacggtatcatatttcagtgtgtataccaaataatccaagtcgctcgggtcgttgatcgctacgacttcaatgtcatctcttgttaatgatgcacggaaaactaaacgaccgatacggccaaatccattgatacccactctaatctttgccatgatgtaatgtttttttaattataaatttgttgtttgttaatattcaataaaggtatgtacttccccctctcgggctattttcatagtccgttcctttttactcaaacgtttgcgttaggaaggataacgaatgccgccatgcttgattttagcacagggcaaacgtttgcggtaggtaccacaaaaagaagaaaggtttcccttgaaaaaataaaaagcaaaatgtgctatatttttttgtgttttcatcttattgtagattgtattaatattctccttagtttcaactgccacaaaagtagaataaattatttttactgcaaaataatttacggatgaaatgattctttttttacttttatcaggagtcattcttttgtctcggtatattctgcagccaaacgcttggaaatgtcccctttttcttctgttcagctcccatataaattcatcttaaatatatgataactataagacaaagataacaatctgttatctttgtcttatagttgtattatctttgatatatagatgtcatatatttgatagggagggaaaagggagagagaagggagcaaggctggcgcaatggggtaaaatcatcgcggtttcagaagcatgtacaatcggttgaaacaacgagatcggctttgcatccgaatatctttatgagaacggagtatttgtatgatatatttcactatatttgcaatgttagcatttataatagaatatgaaacgtccgcagatagtagaacagatacgccaagccttgcgccaggttgctcctgatgcagaagccatactttatggcagcgaggcccgtggtgatgcccgtcccgatagcgacattgatttattggtgttggttggcggaaaccagcttacagtagctgaggaagagcggattatagccccgctatacgatattgagatagaaaccggcgtacaaataaatgcacgggtcattttgaaaaagatttgggataatctgccttttcatacgcctttccatattaatgtaaccaacgagggtattgtgttatgaaagaagaaatgagtgtcaataaccgaaaagcattggctacttatcgctaccaacgtgccaatgaaacattggcagaagtccctttcctgaagcaacagggatattacaatacagctgtgaatcgcctttattatgcttgttattatgcagctgtggctttgctcgtaaggcatggtataaatccgggtactcatgcaggtgtcaaacaaatgatagggatgcactttgtggcaaccggatgtctgtcacgtgaagttggtcgtagcttttccttgttattcgaacgcaggcatagcagcgactatgacgactttgcctattcgagtgttgaagaaattgatgaattgctgcccaaagctaccgcattcattgctgctataggtgaattgctccaaaaagcaggattatgaaatatttggacccgaaggcggatttgacatttaagcgtgtgtttggcgaacatcccgatttggtgatgagtctgcttaatgcgctgctctaaagcctacgtacggcagattgatacgggcaaacaatacgaacagctccagccggtgtattcgctgaatctggtgaataaggtattggaacctgaacaggatggattctatcattattaccgtttggttcatgaggagcatacggacagggtgattgatggcctgcatctgatatttgtcgaattgcccaagtttagtccccattcttacagtgagaaaaagatgcgggtgctctggcttcgctttttgacggaaatcaatgaaaagactcgtgctgtgcccgaagacttgctggcgaatccggaggtgaaaaaagcgataaccgctttggaggaatccgcttttacggatgcgcagttgctgggatacgaaaaattctgggacattatcagtgttgaaaagacgttgtatggcagcgcagagcgcagaggattaaagaaggggttggaacaaggtatccggcagggcattcaacaaggcatcgaacaaggaaagcttgaagtagccagaacgatgaaatcgaatggtatgtcggttgagatggtagctaaatatacaggattgtctcttgaaaatgttcgcagtttgtgaacctgtggtttaatttttacagatgaaaagttttctgagctgcaaatttggtagtctgcgaaacgataggtagggagagaagtttggataataacaaaaccccgacagccggggttttgtttctagaaaatttaaaaaatgaacatgtaattactctactgtaagttcgaaatcatctacgatgagagtactttcaggagctccccaaaatttatcaccgtctttacttgaagagcagataatagctaaacgatataatttgtttgtatcataagctaatttccaatcagaatcttctaattttaattcaaatgacttccactctttttgttcgccaccgctgatttgcttgatagcagcaattcggtctgatgtatagatatctacacctgtcaagcaatctttccagccttcaatgtcatattctgctgtttcgtagataactaagctaatcatgaattggtctgttttgctgttatccaatactgcttggtggcaatggtctttatatggttctttttctacaaaatagtaatctttaccgggtgtatatttgtaccagccttttaaagataacggtttattggcataaggtataccaaatttggtactaagcagggtgtttgaaacgtcagttataaatgtacctaggaataatgttcctgtagtaactttgggtgctttagctacgaaaaggtctttaccttttgtatcaattgatttaattaatgctgcagagtctcctgaatgagcatcttctgtacccataataacatattgatctgttagcttaaaagcttttaagaaatgagcacctgtattactagatgaccaaccgataggttcgtagaatgtcatttctggttcctgaccttttacaccggcagtccaatcttcaaaatcaaagaagatacctcttcctgcaacagatactttatattctgtttttgttccgttttcagcagttacagtgtatgtaacaactttgcctttagaaaaatctacctttgctccgcttgccggtgaaatagttgctccttccgaaattttaatggttggaaccaatgcttttaaataatcatcttttgttgtgtctgcaaccataaaagtgatggttttattctcttcgtcaatggtcggttgaacaattaccaatgagtcaaccggtgcaacttctttgtcgaaggtgaagctgagaatctgtgattcgcttttttcgttgccgttcagtttggttccttcgtaggttactttcaccctctgtttgatatcaccaaccttcaacgaggcttctatgtccaaattgatagtcagtttgttgccggcgaaagcacctgttgcatctactgctgctgtcaatgcttctacatcaacggtggtagtacctgtaaatgtgtaggctcctgcaagttcgttcaattggcaattatctatttttatgtcaccgattttgattcccatgaatgaaaagtctgtgatggctaaattgacagctgattctccggccttggatactgaaatgaattgcgggtcgattgagcctccgggaagttcttgattgccctgtgtgatttttacatccaatttgcctcgatagttgcctgctaattccgagtcaatcgggaatttcggagcgtcatcatcatcatcactacatgcagcgaataaatttactgcacacaaaacagtcagtaaataaatgaataaatttttcttcatgttttccttgttttaaaattaattggttatgaattttattaatcgaatttttcagtcgaattgttttataattcaagcgacaaagtaatagccttttttgtgatgcaacaaggtctatttctcttattattggtctgtttttaactgtttgaagtgaaaaatgatttatatgtgctttaaaataggataaaattaatctgttttttaggttttgtggtttctttgtgagaaataggttatctttgcaaaaaagcagaacaatatggagaatgaattgcctaaaatagatttgcccgaagaatggattgtcgggaccggtattacagaaggtttgttgaatctatataccaactttccttgccgtttgaagtcggaaatttttgtgttgtgtatgaacggtaggatagaggcttctgtgaatttgaatcggattactgtgcagcccaatgattttgtcaccattatgccgggtagcattttgcagatacacgaagtgaccggcgaattggagatttatttcggcggtttttcttccaagtatattgaacaggcaaatctgaatcgttcaacgttgagttctttatatacaactttaggacgtccgcttatttccttgaaagcggaaggggctgccttgttgaaagattatatgagttttctgataaaattgtatggatttttcaatgaagaaagccgtaagttggtcactccacacttatataataatattcatgccggaattcttgccatgtaccagaatcgctatagtaatgttggtacgatgtcgaaaagtgaacagctttgcaaaggttttactcaattggtgatgcagaattatatgtttagtcggaatgttgcctggtatgccgagaaactggagattacacatgcccatctttgtacggtagtcaagcaggtgacagggaatacttgtgtcgagattatttcgagaatggtgattatggatgccaagtcgcagttgaaatccaccaatcggtccgtgcaggaaatttccgattcgctgaactttgcaaatatgtcgtttttcgggaaatattttaagcgatataccggaatgagcccgttggaatatagaaataacggatgatatgcttggcctaattgtttgattaagatagggtaaggatgatattttggggaatgctgattttttcttgatatttttttgtggaaatgtttgcgcaaacgttttaaatatatacctttgccgtcgagatatagagattatattgctttataagtgtagtaaatttattgttagtgtgtttaaaaaaacgaagtcgtgagacttcgtttttttgcttttatggattattcttgttttagccgtttaatgatgagcagctcttttgtgaaagaggtgattttaaaacgatcgtccaaacgatgcccgattacccaagctattttatctccactgagcaataacaggcattcctgtttttggcgggtactgaatttctggttggtaaaaaagtcgctgagtttctttttgcttcgtttcatcccaatggggcagaaatagtcgccggcctgccagttgcgtatggtcaaaggaaatttcactttgtcagcatccagacaggcaatgtcgggagatgtcggtatttcaaaatcctctgtccgcgggaagcggaatatttcaaatttgtagtctcctagtgtataggttcccggttccggtatttccgtactttgctgctggcggatgctgttgtcgtaaagtcgccaataggtgcggcctttttccaatacatagttgccggtgataaactgtttcccgggagtggcagtatgggcattcagtatatcacgtatttgtgtcttgttgaacccgaaggggcgcaaggtttcatatagtaaagtgtagggagcaggagaggatattgttttgtcaatgtgaatcaatatctcgtcttcctcacaatccatgatttcttcctgtagaaccttgattccgtaggtgaaaatttgttctgtctccttcagcgcttcgcatgtatctgctacggtggagagaagcgaaggattgatctctttcatcaccggtatgattttatggcggattttattccgcatgtagtcaagcgagttgtttgtggagtcggttcggaagcccagttgatggtcttcaatgtattttagaatgtcatttcgagagcagttaagcaatggacgcagtatatcgccattgacgggtttgattccggtgagtcctttgatacctgtaccgcggcatagattgatgagtatagtttctgctacatcatcggcatgatgggcaacgacaatataatccattttctttttggctttcatttcgtgaaaccaagtgtaacggagttctctggcagccatttcaatgctgagtccatgctctttggcataagctgtggtgttgaatttcttgacactgtgggcaattccgtaactgtcacagaagcgtttgacgaactgttcgtccatgtccgattctttgcctcgaagggaaaagttgcagtgtagtgccaggattttcaggttcatgtatttaaatgcgtgcaacatgctgatggagtcggctcctccgctgactgccagaatgaaaccggcatctttcggtatccggtatttttccagaaagttttcgattgtttcccgtatcattgttcagtcctccaaaatttatgatttatatttcacttagttccagccatctcatctctttttcgtcaagtaaatctatcagttctccgatgcggttggatttttggattaattcatctgcaggtaaggtgccggaatttaaggcggcttcgatttctgctttttcggcattcagttgctccatctctgtttccagttgttgcatttcctgacgctctttgaatgtcagttttcgcttcttttcggattttgtgatgttgtttgattgggctgtttgaggctcttgttttttcttctcccgttcgattttttcctgttgctctttttcttcttcccgctggtttttgtatatggtgtagttgcccggaaagtctttcacgataccgttgccctcaaatgcaaagattcggtctaccactttatcagtgaaaaagcggtcgtgcgatacaatgagcagacaccctttgaagcttttcaagtattcttccaaaacgttcagggtcacaatatcaaggtcgttggtaggctcgtcgagaatcagaaagttgggattgctcatcaagacagtcagcagatataatctgcgacgctcgcctccgctgagcttttcaaccaaagaatactgttgtttgtcggtaaacatgaagtattccaggaattgtgatgccgacataatccgtccgttgcccaagtcaatgcgttcagagatgtttttgacgatgtcaatcacccggtcgttttccttgaacgtgatgccggattgtttataatatccgtatacgacagtctctccgatggagatagagccgctgtccggttcgatattttgtgtgatgatattcaggaatgtggatttgcctacaccgtttttgcctacaatgccgattttttctccacgtacgaatttataggaaaagtctttcagcaggcaaagcccgtcgtagcttttgttgacatgctccagttcaagaatcttttttcctaagcgttggcctttgatatccagctccattttcttttctgtcactgtttgtgaggcggtttctttcaacttgtagaaattgtcgattctgtattgtgctttgtgccctctggcttgcggcatccggcgcatccattcctgttcggtgcggagtaggttgcgtgctttgtcgacagctgcgttatggttggcaattcgttcctcgcgtttctccaggtagtaggcatagttaccggaataggaaaacaggccgaattcgtctatttcgatgatttgattgcatacacggtccagaaaatagcggtcgtgggtcaccatcagaagcgttgaattggatttgccgagatattcttcgagccattcggtcatttcgatatccaggtggttggtcggctcgtcgagaatcagaaattcgggattgctgatgagtacctttgccagaccgacacgttttttttggcctccggagagttgtgatattttccggtcgtaaaatcctacttttagctcagataaaatctgtttgatagtggtttcataatcccaagccgaatgggcatccatttcagggatgagatgctccaatgctgcggtatcgttgtgttcgacagcgttttcgtaatttttgataagagttaatatcggtgcttccgagttgaagacttcttcaaatacggtattttccgggtcaagcagtggatcttgttcaagaattccaattgaaatgtcgttgcggaagataacggttcctgtttctgcactgtctttacctgcaatgattcgtagcaaagtggatttgcccatgccgtttttggcaataagggcaactttctgacctttgccgactccgaaggatatgtgttcaaaaaggagctgttctccaaatcttttgctgagattatctacctgtaaataacttatcatgtctgaatttccatattagtcaaagtacaaaggtagaaatatcatctaatattgcaatgttattttaccatgaaggtaggctttgcgttcttcgtcggggaagcgttctatggcatagcgcaacatggtgcgcggcatttgctgatagcgtggatgcagaaaagataccaaggtttgtttgtcttttttccctacttcgcgtaagagccagccgacggctttatgtattaagtcgtgtggatggaagagcagtttgtcagcgatggagagacagtcgtaaaagtcattcttgcgcacaaaatgcatgcatgaaacgatggaaatacgctgttcccataagttggacgagtctgccagacggtataaaatcgaacggtctttgtcttcgagccatgagccaaggagtttatagcagctgagatctacgagatcccagttgttgatgccggctgtgtgggctagataaaaatcgacacatgcttggcggagttgctggtcttttttgtttttctcgaaaatcaatagtagtataaaaagggcggtcaagcgtacctcatgccaaggggaccttatcagttcttccaaagagtggaaatctaattgggcgtattgtttggctatggtgcgttgttcgggaactgttactcccaaaaatcggtcgccttctccatattggcctttgcctgtcttgaaaaaataggcaagatgttctgctttggttggtgagcctgctgcctgcagtgctgcaatgactgattgggttgacatatttgcttggttttattttgcaaagttaggggaaatagagtgataatttgttgcatttcaagttgaaataaccaattgttagtaaaaaaggcgtttttgttattaaaaagagggataaaaagggggcagatattttttttaattgtacttttacgacaaatatcataaaatgggaatttatgtctaagataattgctgtagcaaaccaaaaaggtggtgtaggaaagacgacaacttcggttaatttggcagccagtttagctgttttagataaaaaggttttgttggtagatgctgatcctcagggtaatgcttcttccggattggggcatgacgtgcaaaaattggatgacaggacgatttatgaatgtctggttgatggattgtctgcaaaggaggctattttgccaacggaaatagagcatttgtcagtgttgccgtctaatataaatttggtgggagccgaagtggatatgatgaatatggcagaacgtgaaaagatattgaagaagttgttggatgaggtgaaagatgtgtatgactatatcttgatagactgctctccttcgttgggattgataacggtcaattcattgacagcagccgattcggtgattattcctgtgcaatgcgaatattttgcattggaaggtttgggaaaattgttgagtacgattaaattgatacagaaacgtctgaatccaaatttggaaattgaagggtttgtgttgacgatgtacgatgcacgtttgcgtctgtctaatcaggtggtggaagaggtgagaagaaatttccaggatatggtattcaagacgttggttaaccgtaatacgaagttggctgaagctccgggttttggacagccggctattttgtatgatgccaacagccgtggtgctgatgattatatgtcattggcacatgaattgttgaaaagaaatagcggtatataatattgttggataaaatagaggaaaaaaatatatggctaagaagaatgtgttaggacggggcttgggtgcattgattgatgctgccaacgaaccggaagcgcgtgaagttgttgtatcggcgatgcaggaattgagtctggatgatatccgtcccaatcctttccagccgcgtacagaatttgatgaggaggcgttgcaggagttggcggattctatcaaatctatcggtattgtacagcctattactgtgcgtctggtagaggacggcaagtatgaaattgtagccggtgaacgtcgctatcgagcttcgaaaatggccggtttgaaaaccattccggcatatatcaggaaaactgatgatgagaatattttggcattggctttgattgagaatattcagcgtgaagatttgaatgcaattgaggtggctatcagttacaaccgtttgattgacgaatgtaatctgactcaggatgcgttgagtgagaaggtgggcaagaagcgtgctacgattgccaattatttacgtttgttgaaattaccggccccaattcagttggcagtgcgtgacaagaagatatccatgggacatgcccgtgcaattcttggcgtggatgatccggaaactcagttgatgatttttgagcagattttggagtatgatttttctgtgcgtaaagtggaggagattgtcagggaaattgtagatcccaatcacaagggagtgcagaaggatgctttagagaaaaagagaaagaaaatcaatgagatcggagaatatatagatttacagaaacatttgtctcagcgttttagctcgaaggtggagttgaagcgaaatgataagggaagaggtaaaattattataggttttaagtctgattctgaattggagcgaattatcggactgttggataagattgaatgaaaaaaatagtcgttttcttaattggagtattgctggtattcggggtggaagctgctgaaagaggtcgtgatacgcttgctccaaagataggtggagatacattgaaaatgatggaatccattgtaaaaaagccgcattctcctcatagagcgacgattatggctatgattttgcccggttccggacagatttacaatggacaatggtggaaggtgcctattttatatggtggcattgcagcagatttgtatggtattatctggaatcaaaaaagatttaaggaatatagggatgcttatgtagagtgggtcaatcatttggataagctttctaaaaatccggatacgccttatccggatagacctgcatgggataagattcccaagagttttgatgtacagcaatatgtattgggaaatagccaaagggaaaaatggtttagtgatattttgagcaatcgcaagaccagtttcaagcgtaaccgtgacctgtgttatattgtcatggctgctatatatgctttgaatgttatagatgcaacggtgtatgcgcatttttatgattttgagatagatgataagttaagcctgcattggcagccttcagccggttttagtccggttagtggaggttcgttaggcttgacattgactttgaatttttagaaaaaataattataaccggtaataaaagatgattcagtttttattgatggcatcgatgcttctggagggagtatggggaagctctgttatgacagttaaagataccttggcttcgtttaatgaagacaggcaagttgtgttggaagattcaatccctcaatcgttcatagaccggttggattattattataaaagctggcatgcagacaaacggataaaattggagtatgtggattcgttggcaatggcaaatacgactggtgccattgtttgtagcgattctttatatttggcccgtctggattcattacaatcggcaattccattgtcttttaacgatattgtgcggaattacatagagttgtatacagtcaagagacgtttgcaagtggccaatatgttggggctgggtgaatattattttccaatttttgaggaggctttggatgctgaatgtatgcctttggagttaaaatatttgccggttattgaaagtgctttgaatccacgagctctgtcgcgggtcggggcgtgtggattgtggcagtttatgtattctaccggaaagatgtataaattggaaatcaattcttttgttgatgcacgtcgggatccgtatttggctacccaggctgctgtacgctatttgaatgacttgtatgcgatttacgaagattggattttagtgattgcggcatataattgtggtcctggcaatgtaaataaggcaatccgacgttcgggaggaaagaaaaattattgggatatttattataacttgcctcgggaaactcgtgggtatgtgccggcttttattgcagccaattatgtgttcaactattatgaggagcatggtatccagccgttacagcaaagcttgcctcctatgtgcgacagtatcatggtggcagacgggttgcatttcgaacagattgctgctaagttggatttgtcgcttgaagagctgagggatttgaaccctcaatatcgggccgatgtgattccgggaggttttggtaagtcgtatgcattgagattgccttatgaatatgtagggggatttatagataatcaagattctatttttgcgtgcaaccgttcgaagtattttaatgataatgacagaacagcggatccgaaagcaagaattaaagtgcatgcgcctaatctgggacaggagggtaaggctcgtttggtgtatacagtaaaagccggtgatgtaccgggtggtattgcaatgaaatttaatgtgcgtctgtctgatttgaaatattggaataatttgaatcggcggatgactatccgtcagggacagaaattggtgatttatgtccctgaaaagaaattggcccaatataaaggtaaggctaattataccggtaaggtgaacaatacggcttctgcaccgaaggctgccactattgatggtgagtatgtcgtttatacggtgaaaaatggtgagaatctgtggacaatagccaagaaatatcccggtgtttccaatcgggatattatgagatggaatggtttgtcggatgctgatgtccggaaaatcaaaccgggacaaaagttgaagataaagatttaaagtttatcgtatttccggtaagtcgattcctttgatttttctataaagattcagtgcgtaggagtctgtcataccggatacataatctactactgtttgtatttttgtgtacatggaatcatctttgcccactttgtattgttcaggcatgatggataacaagttgcgtgcatagtaggtttccggctttaggactgcatctgtatattcttttaggattgtgcccagtatcttaaaacctgcaatttgaatttgagtgacaataccggtgtggtaaatgcgttcgtatgcaagtttcgtacaggcttcataagccgttttgtttgttccttcaacttgttttatgagagcattgttaaattgcccttccatgatagcatcataattgttgataaaaacatccgtacatgcgttgatcagtttgttgatgatgcctgcgcgtaaaaacgcaatccgttcgtttttgtcagtgactgttttaaaagttttgttgataattttcagatcttctttgtcaaagcttttatcatagaaactttccaagatgtttactgtttcatcataggacaggattcgtagtttgtgagaatcttctatgtccatgatctggtagcagatatcatcggctgcttcaaccaagtatactaaaggatgacgggcatattgcaagggatgatcattcaactgtttaatgcctaatacttcggcaacgagtttgtatatatctttttcactttgaaaaaatccgtatttaaatccttttggatttgccttggtggattcatggggatatttaacgatagatgcaagcgttgtataagtcattgtatagcctcccgggcggcgtccgttaaaactatgcgcgagtagtcggaatgtatttgcattgccttcaaaatgacataaatcgttccattcttcatctgaaaggagtttttttaagtagttgccttctccttcactgaagaaataggaaatggcttcttctcctgaatgaccgaaaggaggatttcccaagtcgtgtgccaaacagcccgtgctgacaatggtaccaatctcttccagtaattccggattctctaaattgacatgtttttgtttgagaaactgacttatcttatttcccaatgaacgtccgacactggcaacttcaaggctatgtgtcagtctgttgtgtacaaatatattacctggtaaaggaaatacttgtgtcttgttttgtaaacggcggaatggtgatgaaaatattagacggtcataatctctttgaaattgagatcgatcatgcgagtggaataatgaggtgatgtttcccggatgatagcggtgcgttgatattaattgattccaattcattggggaagagtttgaagagctttggttaataagaagattagcgggacagagcccgctaatcgttttttttaattatttctttacgaaatggaagtggcttccgaagcgttcaaaagcagctttgtccaattcttcgcggcactgaggcgctgcaatggaaatcaatgcttttgcacgttcttgcagtgttttgccatataagtcaacagctccgaattcagttactacataatgaacatcaaagcgagtggtaacaacaccggctccggtcatgagggtaggactgattttgctgatacctttagctgtcactgccggcatggcgatgattggttttccgccttcgctggctgcagctccacggatgaagtctaactgtccaccgcaaccgctatagaatttgcatcctaaagaatctgcatttacctgtccggtcaagtcgatggaaagagcagagttaatagctgtcattttaggctgttgtgcaatgatgaacggatcattggtataaccgacatccatcatggctactgctgggttgtcatcaataaagtcgtaaacttctttagaacccatcaagaaggttgatacgattttacctttgtcaaatttcttgttgaggttgttgatgacacctttataataaagaggaagtactccgtcagcaaacatctctgtgtggatacccaggtttttgtggttacccaattgagataacactgcattaggaatagctccgatacccatttgcaaacaagctccgtcctcaataagggcagcacagtttttaccaatctggatatcctgttctgacggttgagccggttttgcttcaatcaaaggagtattatcttcgcagaagatatcaatatccgatagtttgatgatggcatctccccatgcgcgtggaacattcgggttgataacagcgataactgttttggcattctgtacagctgctaaagttgcgtctacagaggttcccattgatacatatccgtgtttgtccggcggacatacttgaatcatggctacgtcaacaggagtaacaccggtgcgaatcatcttctgtgtctcgctcaagtgtacaggaatatagtctgcccaaccttcttgagtctctttacgtacattgtggccaacgaagaatgattccaattggaaaattccttcaaattcttgtgctgcataaggagcacttccttctgtgtggaggtgttgtaattttacatctttcaattctccggcacgaccacgctcgcaaagtgcttgaatcagtccctggggggcgcaagctacgctatgaatgtgaatacggtctcccgatttcacggctttcacagcttcttcaaatgatactgtttttattccgttatacatttctgttttatttagtttaaaatctgtactgtacaaacaatgcgaaggtaattaatttacctataatctgaaaatttttgcatttatcttttcatggcacgatccatgtcttttttggcatcttttagttttagagattctcgtttgtcatattcttttttaccttttgccaaggctatgcgcattttggcataacctttttcattaaggaatactctgaccggtacaatcgtcaagccggattctttgacttttcgttctaatttaacaagttctttgtgagtcaaaagaagttttctttcacgtttttcctcgtgattatagtaagtgcctaatttatattccgaaatattcatgcctttcacccataattctccacggtggaaatagcaataagaatcgaccagactggctttgcctgcccggattgattttatttcagtccctgtcagtacgataccggcggtatattcttcaagaaattcataatcgaaggatgcacggcggtttcttatgtttatatcgtttgccatagtttctcgttttttttatacattaattgccgaaatccggaagatgatcattagtagtttagatataatgatgggaaaacagatgattgctaaagaggctataatcaatgtgttcgttttttgatttgtagggatgtcaagcaatgtattgattccattatataatgtccggataaaaataaagctgcaaagagtcaatagttgccctataaataagttgccgaatgctgctcccaaactgtggaataataaaaagaccgtcgcactgtagatggtgagattgaaggctgttgcagcatggcagtttagtttgttgcataaaaattcccggataagccaataggcaagtctgagacctattatagaggatgcaaagtttataatagctagtccgaaggcttgtaatagtgggttgttcaacagattgataggaaaataaacaatcgagcacaaagtgataatcggtacaaagtaattgtgtgtgatatcctttgtatcaatgtgtttgtcctgaatttcactccagtattgggatggggcgaaaatcattcctcgtgtgcgcttgtatatgtttctatattgaattttcattgtgtgcaaaagtacctttttttttgatatcctgtgctgtctgccatataaaatgcttttttatgtagtatatttgtgttgtactaatgatattaaatttagggttatgggagatgtaaatatgaatgaagttttgcagtatttgggtattcgcactgcttgggtgtcggatgttttgacgtctggtgggcgtttgtttgtgatgggtctgatagcatggattgtgtattgggttgctaaaaaatggttatccaaggtgattgtccatttggcgggaaagacctctactcattgggatgattatatgtttgacaggcgtttttttaattattttgccttgctggtggtgccgattgttgttagggttgtttcggatttgttcggttgggtgtatggcgctttgttttataaagtgattaatatttggagtgcattggcggttgctcttctgatatctgccgtgttggatggggcaaatcggatatatgacagctatccggtgtctaagaatcgtcctattaaagtgtttgtgcaggtaattaaaatatttgtatatagtgttgtatttattatttcgtttagcatcatcttggataaagatccacaaagtctgttggtggggcttagtgcttttgctgcagttctgatgttgatatttaaggatgcaatattgggctttgttgccggagtccagttgattgtcaataaaatggtgacgataggggactggattgttatgccttctgcgaatgctgacggcgaggtgagagagataagtttgacaacggttaaggtgcagaattgggataagacgatatctacaattccaacttataaaatggtgtctgagtcgtttacgaattggaggggaatgcaggagtcgaatggaagacgaataaaacgttcggttaatattgatgttcaatctgttcattatttgagtgatggtgaattggaagcattgaaaaagtcgaatttattaaaggagtatataaaatctaagttgagtgagctggagcggaagaataatgttttggagacacctttagataagcagcagttgaccaatatcggtatttttcgagagtatatggaagcgtggatagctcaaaatccagatattgcacaagatatgacgcatatggttcgtcagttacaaccgggcccaacaggcgtgcctttggaaatttattgtttttctgcgcggcaggcttgggttgaatacgaaaaggtgcagtctgatttatttgaccatctgtttgctgtattgcctttgtttaatctaagaattttccagtatccttcggatcagtttaagttgtgataggctaagcgtgacaggggaaagaatatggatgataaattaatttgagataaagtgggataaagtggttgaaagtgggaaatatttttcttaattttacatcatcgaatcaaatggttgttttaaagagtggatgtttgggtaagtgattgtagatgtgtttgttgttatttgattctattaggatgatataagataggaagttaatatgtgtacctttattggagattatacaggcaagatggataataagtgtcgtgtagttgtccctgcatcttttcggaagcagatgatggctgccggtctttctgtgttcgtattgcgtagaagtgtcttcgaaaagtgtattgacatgtatccaatagatgaatgggagcgtatgctggcagggataagggctaaattgaatttatttaatgctaagcatgttgcttttatgcgggagttttgtcggggaactttagaagtggaaatggatgcgaatggtcgtattcttttgccgagaaggttattggatgaggtcgggatagataaagaaatgatatttgctggccaagataaaatgattcaattgtgggatgttgaggagtatgaccgtgttgctgtaacgtcggaggagttgagtgatttggcagaggaaatatttgagaattgaaatattggatttggaaaatcggaataattatgtcggaatatcatataccagttttattgaatgagtctgtagatggattggatcttcagccgggaggagtatatctggatttgacttttgggggtggggggcattcacgtgagattctaagacgtttggatgctgaaggatgtctgttaggctttgaccaagatgaagatgctttagcaaatgtgccagatgatgaccgttttatttttgtaaatcataatttccggtatttgcgaaattttttgcggtattatggctatgaaacagcagatggaattttagctgatttaggagtatcttctcatgaatttgatgaggctgagcgaggtttttcttttcggtttgatgctgagttggatatgagaatgaaccggcgcagtaagttgacggcagcagaggtgttgaatagttataccgctgaacagttggtatctatatttaaaaattatggagaggtagagaatgctaagcggttggtggatatgattgtgaaagcaaggagcgttcaggaactgcatacttcagaagagttttatcaggcaatagaatcttgtattcctaagatgaaggaaaagaaatatttggctaaggtgtatcaagctttaagaattgaggtgaatggagaattggatgctttgaaggatatgatggagcaggcaatggaggtgttgaagcccggtggtagattggtggttatcacttatcattctttggaagatcgtattgttaaaaattttctgaaatcgggtaatgtggaaggtagagtagataaagatgtgttgtttggtcatattaaccataattttgaattggtgaatcgcaaggttattgtgccgtctgaggaggaaatagccgataatccacgggcgagaagtgctaaattgagaattgcaaagaaaatgtcatagttcgaaatgatggatcatagcgcacaagatagagaaaatactgatgctataaaagacgaaaaaaccgggaattctttaaaagaattgttggaagggagaattgtcgcagataagtttaaacggaatggttggtttgttttgtttgtaacagtgttgggtgtctggtatatatcgaatggttattctatggaaaaattacatagagaacgtaacttattagaaagtgaagtgcgtgatttgcgttttgaatctattacagctgcggctgatttgatgtttattagaaaacagtcggaggtgattaagcgtataaaggaagaagggttgacgttggaggagagtaaggaaccaccggtaaaattgtataaatgacgagttggtcatgaaggctaaagatgatataaattatagaaccataggggtgtaccttggaatagtcattgtttgtggttttttgattttggggcgagccatgtatgtgatgactgttgagggtagcaagtggcgtagtatggcttctgcgaatgtgccgtcaaagccggtaagccttgctcctaatcgtggtgatatttgtgctgatgatggtcgtatattagcgacatctgtgccattttatgaaatacgttttgaccctattgctgtaaaaaaagagatttttcaagctaatattgatagcttggcatattgtttatcaaagtttttcaaggatggaagcaagagcttttataaggataaattgacgagagcaagaagtgccaagcatcccaatcggcatttgctgataaacaaacgtagggttaatcatacggaattgaagataatcagacagttccctattttccgtttaggaaaaaataagggtggattgaaggtggaagtatttaataaacgcttacaacctcatgtgaacttagccgtgcgtactataggatatttgaatgaatctgcttcaggtatacgggagggacgagttggtttggaggccgcttttgaaaatgaattgaagggagaggaagggcaaggtatcaaacggatgatgtcgggtacatggatggtgttaccggaacgggaacctattgatggacatgatattgtaacaacaatagatgtggattatcaggatattgtgcagcatgcgttgaaaaagcaattggaaaagagtaatgccacgcatggttcggctatattgatggaggtgaagacgggagatattaaagccatagccaatatggctaaaggatctgatggtcagtatgttgagtctcagaattttgcgattagtggtgccggagaaccgggctctgttattaaggctgcttcgtttattgctttgttggaagatgggattgtaactccagatgatacgatagatttgggacagactggcaaatatctttttaagaaaacacaattgagtgaggctcatgggggattaggtaaagtgactgtacagcaaatgttggaaaaatctgccaatggaatagctaaattggtgtatgataattataaggatcgaccaaaaaagtttgttgatcgctggtattctatgggattaaataagaaaacaggtatttgtctcccgggagaggctgagccttttataaagtatccgacagatgatagctggtctggtatcagtttgccatggatggcttttggctatgaatcgaaattgaccccattacagatattggctttttataatgctatagcaaacgatggacaacggatgcgtcccaggttggtgaaagaggtgcgtaaccatggtcaagtagtagcatcttttgatacagaagagattggaggacgtatctgtagccgcaagagtcttgcaggaattaggagaatgcttgaaggggtcgtagaaaatggaaccgctaggaatatttatacgacaaaatacaggattgccggtaaaacaggaacttcgcgtattgcaagaactaatggtggaggttatgttcctaagagttatcgcgctagttttgttgggtatttcccagcagataagccattgtattcatgtataattgtgattgataatcctcgtaatggatattatgcaacaacggtttctgcccctgtctttcgagagattgcagataaggtatactcaatggcttatgtacaatatggagaaccggaatatgaggttgataaatctttgcctatatgtaaaaatggattaaaggaagattttaaagtgattttggatgagttagatatggatgtagatggttggagtgaggtggaggaaacagattgggtggttacagcaagtaatgagggggaaaatattgtggtaaaaccgaggacggttaattttacgacagtgcctaatgtaaagggaatgggattacgagatgccttgtttctattggaaaattccggattgaaagtaggtgtggccggagcaggaatggtgcaggctcagtcattacagccggggaaagatgtgcctaggggaagttatatacatattgaattaagatgacaaaatgataaatagagaggcggtggaaaccgtataatgatatgaagaaattaaatgaattattggctgatgtgcgtgtgaggtctgtatgtggagatatggataaagaggttttgcatgtgcattttgattcaaggaaagttgaatccggcgatttgtttgtagctcagcgtggcgtaaatgttgatggacatgcctttatcagtaaggctattggggcaggatgttgcgcagtggtgtgtgaagagttgccacaagagatgtctgacaatgtgacttatattgtggttgaagattcatcggaggctttgggaaacattgcttccaattattacgggcgtccttctttaaaaatgaagttagtcggagttacagggacaaatggtaaaacaacaacagcgacgttgctttatgaaatggctcgtttggcgggttataaagccgggttgttatcaacagtctgtaattatattggagatgataaaatcgcctctacccatactacgcctgatgcgttgtctatcaatgaatatatgtatcagatggtggaagccggatgtaaatattgttttatggaggtgagttcgcattcgattcatcaaaaacgtattgccggtttggatttcgatggtgcaatattctcgaacattacacatgatcatttggattaccataaaacatttagagcctatattgaagccaaaaaagctttttttgatggtctgcctgcacatgcttttgcattgacaaatggggatgataagaatggaatggtgatgttgcaaaatacgatagctcgtaagtttgtttattcatgccgcagtttagcagatttcaattgcaagattatagaaaagcatttggatgggatgttgctgaaattggatggtgtggaagtatggactaaatttacgggagattttaatgcttataatatcttagctgtttatgcagcatcgtgtttattaggatttgctaaagaggatatactgaaatatattagtatgttgattcctgtgtccggacgttttgaaacgttgctagcagataatggcgtgatggctgtggtggattatgcgcatactccggatgcattggagaatgtattgtcaacaatcaggggattggtgaaaaaagggaatattgtgattacagttgtcggagccggaggcgatagagataaaacgaaacgtccggagatggcagaagcagcctgtcgctatagtgatcgggtggtgttgacttctgacaatccgagaagtgaggttcctgaaaggattatagacgacatgctagtgggagttaggcttgaggataaagatcgtgttaatgcaattaccgaccgtcgggaagcaattggttttgccattggtttggctaagccgggggatattgtattgattgcaggtaaaggccatgagaattatcaggaaattaaaggcgtgaagtatcattttgatgacaaagaagtggttcatgaggcttttagccgtttgtaataattaatagtattagcttatgttataccatttatttcagtatttggaaagtttggatttgcctggtgcaggtatatttcaatatattaccttccgatcaggttgtgctattatattatctttgattatagcgacggttgtggggaaacgcgttatccgtttgttgcagagacagcaaatcggagaagaaatccgtgacttaggtctagagggacaaatggaaaaaaaaggtactcctacgatgggcggggtgattattttgttagcaatattaattccggtcatattgtttgctcgtttggacaatatttatatccaactgatgattatatcaacaatctggttgggattaatcggttttgctgatgattatataaaggtgttccgaaagcataaggagggattaaaagggcgttttaaagtgatagggcaggtcggattgggattaattgtaggtttgactctttatgtgagtgatgatgtggttattcgggaagtggcaaagcctacagaacttggagttactaccagtattgtagatgagggttttgcaaatgaaacgaaacagcagatggttacaaaagatataaaatccactaaaacgactattccattttttaagaataatgaaatggattatgcttggtttacttcatgtgcaggaaaacatgcagagacattaggttggattctttttgttatagtcactatttttattattacagccgtatctaatggagcaaatttgaccgatggggtagatgggttggcaacaggaacgtcagctattatcggtgctacattgggcattttggcatatgtatcaggaaatatggtgtatgcagattatttgaatattatgtatatccctcattcaggggaattggttgtatttatatctgcttttattggagctactattggtttcttatggtataattcttatccggctcaagtgtttatgggagatacgggaagtttgtctttaggtggaattattgccgtgtttgcaattattattcataaggagttgttgatacctatcttgtgtggaattttcttgatggaaaatctatcagttgtcatgcaggtgagttattttaaatatacgaaacggaaatatggagaaggacgtcggatttttttgatgtctcctttgcatcatcatttccaaaagaagggaattccagaacccaaaattgttactcgtttttggattgttggaataattttagctgtgattacgattgtaactttaaaaataagataaatccggtatattatgaaacttgtgattttgggaggtggagaaagtggggtcggtgctgctttgttagggcgtaaattaggttatgaagtatttttgtcagataaaggaacgttagctgactcgtatagaaatattttgagagaaggtggttttgattttgaggaaggtgggcatacagaaaaacgaatttttgatgcggatattgtagtgaaaagtcctggaataccggacacagtaccaatgattgtacgtttgcgtgaagaaggtatcgaggtcatttctgaaattgaatttgcggggcgtcattcttctgccaagcatatttgtataacggggagtaatgggaagacgacaacaactttattgactcaccatattttaagtcgtgcggggctagatgttggattggcaggaaatgtcggacgcagtctggcagctcaagtggcagagaatgctcatgaggtgtatgttgtagaattgtcaagttttcagttggatggaatgttccgttttagagcagatattgccgtgttgacaaatatcacaccagatcacttggatcgctatgaccataaatttgagaattatataaattccaagtttcgtatattgaataatatgcgtgcagaagatctatttatttatggaaaagatagtgacgcccttgttactaaactgaaaacattgtcaaccgagcctaaatgtgtcggttttacatatggggagcaaagtgaaaattgtgctgcctggatggacggagattggataaaagttattttaaatgacaggaaattccaaataaataaaaatgatataacaatcaaaggacggcataatgtttataatgcaatggctgctattttagcatgtatgcaaatggatttgagtgacgagcagatagttgacggattgaaaacttttcctcaggtagagcatcgtctggaaacagttatgacgaaagatggtgtaacctatattaatgattctaaagctacaaatgttgattctgcttggtatgctcttgatagtatgacaggatcagttgtgtggattgcaggaggaacggataaaggaaatgattacagtgtcttgtttgacttggtgcgcgagaaggtgaaggttttggtttgtatggggttggataatcataaattagtgcaggaatttagcccattatgtgaagtggttgatactgcgagtttagatgatgcgatgaaggcagttcagcaatgggcaaaaccgggagatacagtgttgttgtctccttgctgtgcaagttttgatttattcaagaattacgaggatagaggtcgattgtttaaagaggcagttcggaaactttgaatgaacagcgtgtatgaaagattttgctaaaagattattaaaaggggatattattttgttgagtgtaatcattcttttaatgcttacctcactcttggtgattttttcatcaacaggcaggttggcatattatgagcaggatggtaatacttggcattatttctttaagcaattggggttgagtctttctggtctcggaattatgtgggtaatgagatttttttcatggcgattgctatatgaacatgtggggcttattcttattattgcagccggtttagttgctttggctgcatttggaggtgaaaacattaatggggctggtcggtggttgaggattcctattataggtataacctttcaaccttctgaaattgcaaagattgccgtcgtattattttctgcaaaattactttctaaacatcaagagacagataaatgttcttcagaagttctcaagtttttttgggctcctcttgtggttgtttttctgatttttttggataatttttcgacttcagtattggtttctttagtttgtttactgatgtgttgggtggggagagtccgaagcttattattgttaaaatggatgggtatcggtgttggtgctttggttcttgtgataatgctaggagtaacctttcctgctgttcaaaaagcggggcgtataggaacaattgtcggtcgtttagtcgcatgggtggataaagatcgagatacagataaagggaaaaattataattatcagtcagatcaggctcatattgctgttgcaaaaggaggtatgactggatgtggccccggtaatagcatacagcgaaattttttgcctcatccatattctgattttatttatgctattattattgaagagtatggtttagtagggggaatatttatatttctgctctatactattattttgtttagagttggagtgattgctcataaaaccttgaaaacagagcagcaaaatgagtgtggtggacctgaaatattcccggccttagtagttattggtcttggattttctattgtattgcaggcgatgtttcacatggctgtaaatgtaggggctatgcctgttacaggacaaactcttccgttggttagtatgggtggaacatcattgtggtttgtattggcagctttgggtattatattaaatattgcttatgattattctccagaaggtttggctgaagagagtgttaaaaaacagtatagagcgaaagtaggtgattttaaaaagtttgatgggagaggaaatgtacaaaattatactacggaggaggctgctgtacaccgtccatctcgacagaaagagaagaatgaagatgaatttttagaagaaaattttgaagagataggtgaaaatggcttaccggatttggagaaacaattgcaagatgaaggacgggaagtattgcaagaattaaatagaagaggaagaagaagtagggcataaatggaaaatgttgaaaagttaaatatttaaagatatgaagcgaattattgtcagtggaggaggtacgggggggcatatatttccagctttgtcaatagcaaatgctttgaagcgtttgttgccagatgtagagatattatttgtcggtgcagaggggaaaatggaaatggaaaaggtgccggaggctggctatcggattgtgggattacctgtgagagggttgcagcgaaagcttacattggagaatataaaggtgctgattaatttgtggaaaagtttacgtaaggcaaagcgtattttgcaggattttaaaccggatgcagtggtcggagttggaggttatgcaagtggtcctatcgggagagtggcagcaaaagcaggagtgcctttgatattgcaggagcaaaattcttatgcgggtgtgaccaataagctattgtctagatatgcttgtcgaatatgtgttgcttatgatgggatggagcgtttttttgataagagtaaaatcgtatttactgggaatcctgtaagaaaagatttattgcaagttcagaataagcgagaagaaggaatgcaactttatggtttggatccgatgaaaaaaacgattttagtgactggcggaagtttgggggcaggaactttaaataaagctgttaagaaacatattagcaccattgcaggttgggataatgtacagattctatggcagtgcggtagttattattataatgatttgagtaaagagttgcatgaagttttacctaagaatatttgtctaacagcttttttgaagaggatggacttggcatatgcatgtgcggatatagttgtagctcgtgcaggtgcaggtactatttctgaattatgtttgttagagaaagctgcaatattggtgccttcccctaatgtggcagaagatcaccagactaaaaatgctatggcattagtggataaaggtgctgctattatgttgcgggatgtagaagcagaggaaaaatttggtgacacattgttttcattattagctgacgaaacaaaaatgcagaatttacggaaacaaatcagtaaaatggccgttcatgattcagatgtaaaaattgccagagagattttagatgttataaataccagtaaataataggagtaggtatgacacatattatagatgaaaggataaaaaatgtatatttccttggtataggagggattgggatgagtgctcttgctcgttattttaaggctgtagggtatcgggtaggaggatatgatcgtaccccatcggcgctaacacaaaagatgcagatggaggaaggaatagaaatcaattacgatgatataagtgaagcaattccttctgagtttcaggataaacataagacattattagtttatactccagcagtgcctgataataatcaacaaatgtcttttttccgcgaaatggggtttacactacataaaagggcagaagttttgggaatgatttcgcgtcaaggaaaagcaatttgtgtagctggtacacatggaaagacaacgatatcaacgatgactgcttttttattgcagcgctcagaaattggttgtaatgcttttttgggtggaatatctgctaactttgggacgaatttattacttgatgctcattcttcttatattgtgatagaggcagatgaatttgaccgttcatttttgcatttaagtcccactttggcggcaattacttccatagatgaagaccatttggatatctatcaaaataaagctaatttgactgaggcatttaaaagttttgcacagttggtttctccgacaggagtgttgtttttaaaacaggggcttgtgttgccaggcatagatagagctttatattatggagtagagacagatgcgatgtgtcgagctgaaaatttgcgcgtcgacaatgggctttatatatttgattattatggccggggtgttgaaattaaaaatttaaaactgggtgtaccggggcggttaaatgttgaaaatgcgacgattgctattactttagcattggaagccggagtgagtcttgaagaaattcgtagggcattacctgattttaggggtgtagcaaggcgatttaatattcatgtgaataatacaagtgtcatttatattgatgattatgcccaccatcctaaagagattgaggctacattgcgttctgttagagaaatatggccgaataaaaaagtaaatgttatttttcaaccacatctttattcgcggactaaagatttttatttggattttgcccgtagtttaagtttggcagataacgtattgttgttagatatttatcctgcgcgggaattgcctatacctggggtgacttcacaaatgatatgcgataatctaacggtatcaggaacaataaagagtaaagaagagattttatcatggttagaacaagattttcaggatgatattgttataacaatgggtgcgggagatatagaccgtttggtaagtagaataacagaaatactaagatgtaaaaatatctaacaaagatatagagagaggtttatgaaaaaagcattaccttatatattatctgtctgtttatttgcatacctgataattgtgcttacctttgcaagcatgaagttgaaagaggtaacctgcagaggcgtgcaagttatcgttgacgatacagaggaaaatgcgtttgtagaggaagaggatgtgcagaaagtgattaagcgtcattatggagatctgaataatgttaatgtagttacaatagacaaggatagtatggaacaggtactgagcagatacccggttattaaatctgctcaggtttactatagtttggatggttattttcatatagatatcaaacaacggatgcctgtattgcgaattatgtctggtgagggatattatgtggatgaggatgggaaagtaatgccattatctagaaaatatacttctcgtgtgatggttgccacaggcaatatttctaagaagtttgcatgtaatgaattatatccttttgtaatgaccttaaagaatgatcggttttggaatgctttgatagaacagatagttgttactggaacagatgaagttaatttaattccaaaagtcggtaattttcggatagttttggggagattagaaaatgtggataaaaagatggagaatttgcgattatttcttcaaaaaggcataactttgaaaggatggaatgtttacaaggaagtcaacttgaaatttgataatcaagttgtttgtgtgaaacgataaatttttatcaaaataattaggcagcttatggttactgcatctttagatataggagctgaaaaaatggttttggcgctggcttcagttgaaggtcgcgcatgccgtttgttgggtattaaaactgtggcatctcaaggaatcgagcgtggaataataaatgatttggataaagttcgtgattgcatacatgttttaatgtcagaattggtacgagaacgtgaggttgatgtattgaatattgcattatcatcggaaatattgagaatatttgagcatagggtgactgttcctgttcagaaaaaaagtgttgatattgttgatttggtttcagctttacaatattgccgagaagacatgaaaagagaaagtgacgaattggtagatatgatacccgttgcatattccattgataggggagagttgatggcggatcccattggtcgtatcggtagacatttagaagcaacctttcaagtgtaccttgctagtggagagtatttggatgaagtcacttctttgtttgacggatataatattggcaatgtatttttttattctacagctaaagcttatatggaggctttagatgtggttaatgctaaagattttgctttagttgatttaggtgcatccggtattaatgtcgagttgtttagagatgggatgatggagtatgaagctcgccttccattagggactcgcactatagataaggatatcatgttagcatttgctatcaatgctcaacaagcaagaaaattgaaacatgaatatggtcaggctttgcgttcttcttgtaaatataggaaaatacaaataccggatacaaacttgactattgagaatagggatcttgctacagtggtgcaaagtcgtgttgaagaattattggaaggagtggtgtttttattacaaaaatggggctttgataatcctgatgatgaagtgttattgactggaggtggaagtcggttgcaggatttagatttattgttaaaccgtttttcagggcatcctgtgggtaaggctattgcaaaaaatattcaggcatcaagagatgagattttgtcgactccggaatatttagtcgcattaggattattattttgcaaacatccgatagaggagcaacccaaagaaggagtatggaagaaaacgaaaaacatatttgctaaatttttaggagtttaagtatgtcgcctactaaaagaattttaatattttgtcgttttgagtatgatagatatagatgatgatatgatttccttggatttaccagatcaatctcaagaagaatcaattataaaggtaatcggtgttggaggaggaggaagcaatgctgtgaatcatatgtttaaccaagggatacatggtgttgaatttgttgtttgtaacacggatatacaagctttacgccaaagtagggtaaaaaatagagtacaacttggtaaagaattgactgagggacgaggtgctggttgtcagccagagaggggacgtttgtctgcaattgagagtatggactttattaaaacgatattgcagcgaaatactcgaatggtgtttattactgcgggaatgggaggaggtacaggaactggtgcggctccagaaatagcaaaacaagcccgcgaattaggaattctgacgataggtattgtaactgtaccattcagttttgaaggtaaacgcaaaattgaacaggcaatggaaggtattgatgagttggaacagtatgtcgatgccttgttgattattgctaatgaacgattacgagaaatatatggagatttaaaattatcagatgcttttgctactgctgataatgttttaacaatagctgcgaaaagtatagctgaaattataaccgtaaaaggttatgtaaatgttgattttgcagatgttgaaagtgttatgcgtgatagtggtgtcgctttgatgggagcagcagaggcagagggagagggccgtgctatggaggcattgaataaagccttaatttctcctttattgaatagtaatgatatccgaggtgcttctaatattttattgaatatgctttatggtgataaagaagtgacaatggatgaaattactctgattacggatactttgcaagaaaaagtgggacggagtgttaatgtgatttgggggtcagggaaggactctacattgggagataaattgcgtgtagctgttattgcaacaggttttaatcaaagtggttctaaaagtgttgcttctagcgataaacgggaatatgttgaaaatataacaccaccatcacataaaccatattttcctgtagaacaaatgcctgatgacttggagatgcatacaatggattctactaaaatggaagaggaagctcgtataaagcgagctcgacaagaagaggatcgtcgtcgcaaacaaaatcgggaaacagcacgtcgtacaaataattttgaaagaattaaaagaggcttgaatgaatctcctgatacagataattggttgcaacgtaagctaggtactttgtttagtgatgaagagtaatctagtaaaagtatgttaataaataaatcaagatagccatgggtgacggatttataaattttaatctgaatgagaagactccaacaataataaaagtaataggtgtcggaggtggaggagggaatgctgtggagtatatgtatgataaaggaatatgtgatgtggattttgttatctgtaatacagattatcaggcattgcaaaatagtccaattccatataaaatacaattaggcaaggagttgacgggtggtcatggtgcagggaataatcctgagaaaggcgaaaagtctgctcaagaaagtcttgcagacatcgaaactctcttgagaaaaaacaccaaaatggcatttataacggcagcattaggtggaggaacaggcaccggtgcagctcctgttattgctagtctgtcaaaagatctaggaattttaaccgtgggtattgtttctgtaccagcacgctttgaaggtcctaagcgtttagagcaagcaagagaaggactaaaaaaaatgaaggagcatgtggattgcttgattgttattgataatgaaaaaataaaatcaatttatggatcgcatacaataacagaggcttttgctaaagcaaatgatgtattaaatatagcagctaaaggtattgctgaaattataactttgccaggctatattaatgttgactttgcagatgtaaaaacagttatgactgatagtggagttgctattatgggggctgcaaaagcttcaggggcagatcgtgcaattcgtgctatatcggaagcattagaaagtccattattaaataataatgatatacttggtgctaaagatattttgttgaatattacttctggtacggatgaaattacaatggatgaaatgactcagattacttctcatataattcgtaaagtgggtaataatgcagccgttatttggggtgtggggacagatataaatttaggtgatgcaatttctgtaactattattgctactggttttcctgctgtagaattagagaatgaaccaagggcacgtatcgctacagagccaggaataaaattagtagaagatgaagtgcttttaaagccagggttgtctgcagctcgtattaaggagttagagaatacagcagcttttgagcgtagggatttgagatttaattaaaatcgaaaaaagggtaactatcgttgccataacaagtaaagcgatgtaaatcgcatgattaaatgaatggaaaaatttaaagaattaggtttagaaggagagatcctaaaaggtattgaagatttaggttttaaagtgccaagtgcgatacaggaaaaagtgattcctgtgattttgagtgaagaaaatgatctggttgctttagcacaaacaggaacaggaaagactgctgcttttggtttgccgttactacaaaaattagacacttctttgtcggaaatacaagttttgattttgagtccgactagagaattgtgtgtacagatcggtaaggacttgcagaattattctaaatatcgtaccgatataaaaattgtgtgtgtttatggaggaacagatattcgacggcagattaaagatttggagcgtggggctcaagtcttggtggctactcctggacggttatgtgatttgctgaagcggaatgctgtaaatattgagtatgttcgttctgttgtattagatgaggctgatgaaatgcttaatatggggtttaaagaagaccttaattttattttggatgaaactcctgaaacccgtaacacttatcttttttcagcaacaatgccgcgggaagtggagcgtattgcaaaaaattatttgaagcatcctcaagaaatatctacaggtaaaaaaaatcaaggtgcggatacagtttcccatgaatactatttggtgcgggctaaggattgttatgaaacgttgcatcgtgtgatagattgtgctcctgatatgtatgcaattatttttacgcgtacaaagatagatgctagagatattgctcggaaattacagaagggaggcatcgattgcgatgcattacatggtgatttaagtcaaactcagcgcgatgaagttatggagcgttttagagcaaaacgcttaaaggtattggtggcaacggatgttgctgctcgaggattggatgttgataatttgactcatgttattaattataatcttccggaagatgtagagagttatactcatcgtagtggacgtacgggacgtgctgggcgtgagggtatttctgttgcaattatcaattctaaagaaaaaggtaaactacgtcggatagaaaatattattaagaaaaaatttcaatatcgagaggttccaggaggagaacaaatttgtcgtgctcaactactctattacgccgataaaataatagcggcggagcctaaagaaatgttggataaatatcagcatgatttatttgccaaatttgaggcgttgaccaaagaagaattgatacaaaaaatggtatcttacgaatttggtaagttattgaagaaatatgcaatggtggaggatttgaacttgcctgagtctgagcattatgaaggacgtgatggtaaaaagggaaaaattcgtggcgatgaggaacagtgtgaatatacgacctttagtgttagtgttgggcgtgaggatggttttactcctcgggatttaatggcaattataaatgaaaatgctccacgtaaaggaatagaaattggaagtatacggatctttgataataatacaaaatttgaagtagatattcgggggctgaatggatttatctcttatttccgtaatgttagttttaatggtctgccttttactttaacagagattaaagatcgctataatcgagataaaggacatggacgagatagaaattcacaaagtaataagggaggacgtcgtaattcaaccgcaaataataaatggagagcagaaaagaagcgtagtgatagtggtaaacgtgggcgttttgctgaaaagaaaaaaggtcaaggtaggaccaaactccgccagaaataaaatgtgaaggcatattaaaatgacctctttataacccttaagaaggtcgtatcaaactctattgagaatgatacgactctttttattcttttaggatattcaaattataagttcatatttatattgattttagaaaacgaacataactaataagtaaatccagtgagctacgatagctgcgataatacctccgattgtatgtgaaatgatggcttttgaggtcaattctctataacctaaagaatctaacatagccgtgtgtgtacttaaataaccactccagcacattccgattgctgtacatactgcaattgcattgccattaatccagccttcggcagcaaagttcggtattaaacttaatgcagcaccaactgctcctaaggctgtaattggaaatgcaattaaatgtggatctgtaaaaccaaacaaccattcaaatagaaagtttattttgtgtgcaaggttgggtaataattcaacaccttgatatgcacctccgttatatccttctaacggagcgccaaaagtaagaatcataacaagtgatgaaatgactaaaacaccagggataatggctattccgacttctactccacctttgcctccatcaagtagagaatttagaatacgtaaaaaaaattccctgagattcatctttttctgtatttgtattatttttttcttcttcgttagcattttcattagcatattctgggtaagactttaatataaaatattgcatgagtcgagtagatacaatgcagccgcagaaagctcctattaaacctataaatggttcaaaagtatatccttgtcctatcatgaaaacaataactaataaccccattccaaatgctgttccaaaattggttagtgaaatgtattggtgttttttgaaataactactgaaacgtttgtcttgggctaatgagataattgcagggttgtcggataaaaatgtcataacagcacctaatgaggctactcccggaagattaaaaagtggtttcattagagggcggagtaaagcctcaataagattgactactttaaattctacaaatagtctgcctagagctcctgtaataacgcaaatacccatcaagtaaaatactgtattaagtaataaatcatgtgctgttttcataattgtattgagcatattagctacacccattttatagccgatatagccaaagagacctgtaacaatgcacatgcaggcgcttcctgacaaaatgtttttagtttgtgatttcattttttttagtttgtatgttagtaaagaatctttagcaaagtctattttgaattttatagttagttttttgcaaatatataataataattaaataaatcaagttgttatttatgaaaacaatttatatgatagggcataaaaaaacagtgtagcttttatagctacactgttttatatttaattctatttcaattacttatttgacttcctcaaagtctacatcagttacttcttgatcttttccattgttagcttgattggcattaggattaccttgaggattctgtgctccttgctgttgttgagcttgagcgttatacatttcctgcgaggcagcctggaatacattattcaatttatcaatggcagcattgatgcgagcaatgtcttgagatttatgtgcgtctttcagttcttgaagagctgattcaatcggagcctttttgtcagcaggtaatttatctccaaattctttcaactgtttttcagtttggaaaatcatagagtctgccttattgattgtatcaaccttttctttttcctgttggtctgcagcagcattagcagcagcttcgtctttcatgcgcttgatttcagcgtcagatagacccgatgaagcttcaatacgaattgactgctctttgccggttgccttatctttagcagatacattcaaaataccgttggcatcaatatcgaaagtaacttcaatctgtggtacaccacgtggtgctggtggaatactgtctaagtggaaacgaccaattgtcttgttgtcacgtgccattggacgttcgccctgcaagatatgaatttctacagaaggttggttatccgcagccgtagagaatacctcagactttttagtaggaatggttgtattggcttcaattaattttgtcattacaccacctaaagtctcaattcctaatgacaatggagtaacatcaagcagtaatacgtccttcacttctcctgtcaatacaccaccttgaattgcagcacctacggctacaacttcatccgggttaacgccttttgaaggtgcttttccgaagaactcttgtaccttttgctgaacagccgggatacgagttgaacctccaaccagaattacttcatcaatatctgaaggtttcatatttgcatcattcaacgctttgcggcaaggctcaatggttgcttgaatcaaatcgtagcataactgttcgaattgagcacgagtcaaagtgcgtaccaagtgctttggaattccgttaaccgggaaaatatacggtaaattaatctcagtagaggtagagctagacaattctattttcgccttttctgccgcctctttcaaacgctggtgtgccatcgggtctttacggatgtcaacgccttcgtctttctggaattcatctgccaaccaattgatgattttatcatcaaagtcatcacctcctaggtgagtatctccattggttgattttacttcaaatactccgtcacctaattccaaaattgagatatcaaatgtaccgccaccgaggtcaaatactgcaattttttgatcttgagtttttttatccaaaccatatgccaatgcagctgctgtcggttcgttgataatacgtttcacggttaatcctgcaatttcaccagcttctttagttgcttgacgttgagcatcattaaaatatgccggaacagtaatgacagcctctgatacttcctgtcccaaataatcttcagctgtttttttcattttctgaagaaccattgcagaaatttcctgtggagaatactgacggttgtcaattacaacacgtggagtattgttatcaccacgtacaacttgataagctacacgattaacctcactatctacctggtcaaaagtttcacccatgaaacgcttgatagagtagattgtcttgtgaggatttgtgattgcttgacgtttcgcaggatcacctactttacgttctccattatctacaaatgctacgatagaaggtgttgtacgtctaccttcgctatttggtattactaccggttcgttaccttccattacggcaacgcatgagttggtagtacctaagtcgattccaataatctttcccataattgttatatttttatttgttattattcaagtttctgtgtctgatgtattgattcaaacacatcattcttttatcaaatggtgtgccattggcaagagtggatgtttttttgtaaaaatggcggatttatttatatcttgattcttatgtgtcagtttttgctgacataacggcatgaaatattgatgtatttagttgcaaatgaaaacagcctagcaaaaatgccaggctgtttaaatgaagtgaagagattttattctaattctttcaatattttttcaacatctccaggtactacacggccgaaaactttttcgccgattaataccacgggggctaggccacaggcgccaacacatcggaggctggacaaggaaaacttgccgtcgggagtcgtttctccgacattgatattcagtaaccttctgaattcatccaacactttttctgctccatgtacatagcatgccgtacccatacatacggaaatcggatactctcctttgggtgtcatattgaaaaatgaataaaaggtgactacgccatatacttttgacacaggaatatccagttgcttggcaacaatacgttgtacctcaggtggtaaataaccgaaaagatgctgtgctttatggagtatattaatcaattcgccgggttgattgccatgttccttgcaaatagccagcaatttgtccattttatcttgtgaaattttaaaatcactcataagtaatatatttacaatgttttatgttttaatcttggcgttatcctttacgaaaatagtgtgtatgtaacaagtggtgtgctttttcgctaaggggtttgccaagaaaatcttcgtacagtcggatgatgtctggattttcgtgtgattttcgtaatggtttgtcctgatcttcttcgtatagagctttgctgcgagcttttagaagttccgaattcccatgatgaagaggttgacctcctccaccgatgcatccgccagggcatgccataatttctattgcatgaaattctgacttaccttctctgatttcttttaacagcctgcgggcgtttcctaaaccatgagcaattcctacttttaattggatgccaccaaggtcaatggttgctcgtttgatgctttctaatcctctgacttcttcaaaatcaagtttttcaagtggtttccctgtatatagttcgtatgctgtacgtagtgctgcttccattacgcctcctgatgcaccgaaaatcacgccggcaccggtggattgtcccaaaggatggtcaaaatcttcgtcttccaatgcattaaagtcaatattggctcgtttgatcagactagccaattcgcgggttgaaagtgagtagttgacatccggatccccattggttgaaaattcttcgcgcgcacactcgtattttttggccagacagggcatgattgagacgacaatcagatcttctctagggatattcattttctcagcccaataagttttggctatagaaccgaacatttgctgcggagaacgggctgtagatgggatatccagcatatctggaaattggtgctcgaagaaatttacccatgccggacagcaggatgtcagaataggcaatcgtacatctttgtctccttttaaatagcgttccaggcggtcaagtagttcgctgccttcttccatgatggttaaatctgctgcaaagtcagtgtcaaatacctgtttgaatcctaattgtcttaatgcagccaccattttgccggtaaccgatgttcccggtttgagcccgaattcttcgcccaaggctgctcggacagcaggagccgtttgtacaatgacagttttctttgggttgtttaaatcacgcaacaatcgattcgtgtggtctacttctgtcagtgcgccaaccggacatacggcgacacattgaccgcaaaatgtacattccgaattggcgagtgactcatggaatgcaggcgaaatagtagaggcaaaacctcggtttacagcagctaaagctccaactgtttgtacttcattgcacatcatttcacaacggcgacagtagatacatttatccatgtcgcgtatgatggatggtgaagtttcaatagggagcatattgcgctcaccagtaaaaggaatttcgcgtatttttaatcttactgccagactttgtaattcacagttgccggatttgggacacaccaggcaatcattgggatggtcagacaaaatcaattccaagactgttttgcgggcatttaatacccgtaggctgctggtattcactttcatgccattttcacagcgtgtagcacaggcaggagccagattgcggcgtccttccacttccacaacacagatacgacaggatgccggcaggtttgtgatacacatatcttttaaattcatatagcagagcgacgggattttgatgccaatctgtcgggctgcttccagtatggtagtccctttttccacctctactgtatgatggtctatctgaagtgttattttttgcataattttcgagttaatggttatcttactccaatcgctttgaatttacatttttccttgcaggcgccgcatttgatacacttggttgtatctataaagtgcggttctttgcgttcgccacgtattgcatcaaccgggcaattacgtgcgcagagcgtacaacctacgcatacttgcgggtcaatataatatgaaagcaacgctttacaacgtcctgccggacatttgtggtcgcgaatgtgtgcaagatactcgtcatagaaattatccagagttgataataccgggttaggggaggtctgtcccagtccgcatagtgcggtatccttgattacctgactcaaagttcgtagattttccaggtcctccatcgttcctttgccttcggtaatgcgtgtcagaatttccaacagtcttttatttccgatgcgacaaggagaacatttaccgcacgactcttctacgataaactccatataaaattttgcaaccgataccatgcagtcgtcttcgtccatgacaatcataccgccggaacccatcatagatccggctgcaagcagattgtcaaaatcaatcggagtatctagatgtttctctgtcaggcatcctccggatggaccgccggtttgtacggccttgaattttttaccgtttttgatacccccgccgatttcatatatcacctctcttaacgtggtacccatgggcacttcaatcagaccgacattgttgattttaccggcaagggcaaacaccttggttcctttggagcgttcagttccgataccggcaaaccattccgctcctttgtttaatatggctggaatattggcaagtgtttccacattatttacatttgtcggtttattcagatagcctgattctgccgggaaaggaggttttgtagtcggttcccctctgtgcccttccatagaatggatgagtgcggtttcttcaccacagacgaaagcaccggccccatagcggatttcgatatggaagctgaaatttgtccctaatatattatctcctaaaagtccatacttctctgcttgctcgatggcaatacgcagacgttcaatagccagcgggtattcggcacgaatatataccaatcctttgttggcacctatactatatccgcagatagccattgcttcaataattgaatttgggtcaccttccataatggagcgatccataaaggctccgggatctccttcgtctgcattacagacaacatatttttgttcattttgatatttacgtgcaaactcccatttcatgccggtcggaaatccgccaccgcctcgacctctcagacctgaacgtttgatttcgtcaatgacagcttcgggtgtcatctctgtcaaacatttggcaagtgcagcataaccatcgcgtgctatatattcttctatattttccggattgataaatccacagttccgtaaagcgattcgaagctgtttcttatagaaattcatgtgttttgaatcactgacggctccttttttttccgggtctttgtatagcaatcgttccacttttctccccttgatgatatgttcgtctacaatttctgcagcatcttcaggttttacttgtacgtagaacgtattgtctggtatgatttttacgataggacctttttcgcagaaaccgaaacaaccggtaccgattaccagtacatctttgtctaaatccctttctttcagacattcttgcaattgatgaatgatattcttgctggcagatgcccggcatcccgttcctccgcacacaagaatgtgcattttatagctcataaattcgttggttttatatggattaatatttagttgcgtagtgttagtatcaatgtttcatcaaataattctgcacgatttcctttacttttgtacaatccacttttttgaacactgtagattgttcgcccggtttggtaatttcgacagtaggttcttctttgcagtatcccatacagtctgtttgagtgacaacagcatccagtccattttgctttacttgttccagaaagcattccatcgtagctttgctgcctgctgcaataccgcaagtacccatcgccacttttatttggattctttgttccggatgctcgcttttctcgcgcagttctattttagcctgtgcttcttcttttattctttttaagtctgccggtgatttgattttttccataggtcgatagtttgttttaataatctaagataataggcttttatgttttctaagttttgtgatttcaattttggttgcccgtgtccggacagaatttagaacaacgtcaagcatgtgtgaagccaagtctctcataaatttatcaaatttacatttatatcctgtttctgttcttttggtttgaaattataattaattcgcccaaagttagtttaatatgataaatttccaacgtttgcgctcgggaaaatgaaaatattttttatgtttgatattgtaccttaaagaaaaaagaaatgatatgccggcaataataattggaggaataaatagcccaaataataaggctatgacctaaattcctctcctttccctttctgatacgccccattatgagaatgtgccatttgaggtgccggaatcgtgggtgtggtgtaagttggatgatttagctttttacaaaaaaggaccttttgggagtagcctaaccaaagctatgtttgtccctaaaggcaaagatacatacaaagtatatgaacagaaaaatgctatacaaaaggaccataagcttggttcttattacatttcaacggaaaaatattgctcactgagtgactttgctgttcatccaaatgatataatcgttagttgcgctgggactattggagaaacttatgttttgccacaaaatattcaagagggaattatcaatcaagctttgatgttaatacgcttatataatcgtgaaattgaaggtttttatctactttatttcgattttattctcaaacaagaagcgtataaagaaagtaaaggaacggctataaaaaatattccacctttcgatgtattaaaaaacttctttattccaattccgcccaaagaggaacaaaaaagaataatgagcgaggttgataaatggatgtcttttgttgattatatagatactaatagtaaagacttacaattgtacattaagcataccaagagcaaaatccttgaccttgccattcacggtaaacttgtgccgcaggaccctaacgatgagccagccattgaactcttgaaacgcataaatcccggcttcacaccttgtgataacgagcatagtgagaagtttccaaataagtggtgttattgctcatttaaggatatatttatagagattacatcaaaaccatatcaaatattacagtcacgaataaaaggctctggtaaatatccagtaataagccaaagtgccaatttcatagaaggctattctgacgaaaataatgtattccaacataaacgaccatgcataatatttggagatcatacacgaaatgttaaatacattgattttgactttatcgttggagctgatggagtaaaaattctaagtccaaaagtaaatgagaaatgggcttactatttaatagtatatgcatcggcacatattgagaataaaggttatagcagacattttagtcaaattgtcaaatttagcatgatgctacctcctcttgcagaacagcaacgcatagttgtaataagcaaattttaaatcgacaattttcggaaaagtaaaatcgacacaaataagtcgagacaaaatgttaataatatcaattaaatactatagccaaaccctatttaaaggggattatccttattctttatcattgtcaaagatggattttctatttcccattctgtagctttgtccagagagtttaatgacttcacaatgatacaaaagccgatcaagtatagcagaggcaagcacttcatcatccagagtttttgcccattcagtcggagccttgtttgttgtgattatcaaggacgctttctcatggagagtgttgattaggttaaagaaacccgctgcatcttcttttttcacagggaacagcattatatcatcaatggcgacgaggtcagctttcaacaaacggttgtaggcagtcatggcagatggcatcagtgttttcattttaatggtgtttataacatcttccatcgtaaccatgtatgccttgtaaccttgcgataccgcttcatagacaagtcctgccgcaataaatgttttcccggtaccggatggtcccatgagtatcagattgtaattctgttcaagccatccgagatgccttaattcacgcagtcttggtgcggttatgccttgtgagtaattatggtcgaaaaggtctaggtcgtgtcttgacggcagagaagctgcttttagtcgccgttgtaagtctttgctatccctttccagaacttctctagcaagcaaatcatgtaaaaattcaacataggtcttgctctgttcccgtgcaatatgggcttcggattccaataacctcggaagggcatacaagcgtaaacgcgagcataaatttttaatctgttcgttcattatcatataaaaaaggtattgaatgttgatatgtctgttttatcgggcaccatggaagaggtatcggaggatgggaccggctctgtttctacaggaacttccacaagggcctctcctttgtggactctgatactttcggctactttcatcaggctacatccattaaagaccttcacttccaaacatcttgtaaaggcttctatcaacgtgggttctgtatagaagggatatcggagaagtataaactgcaggttgtctctatagttacgattcttatgaatgcgtagttcagataaataggtatcaatgaccgtatccccgggaagtcttttacggacagtagcctcgtaatcatccaaggcagcttcacggtctcgccgatgtgaggtattacttattaactgtcctttatctttgcagattttgtgtgctgctatatttttccctgtttcaaggctgtaaatatacagcatctcttccttttcttccagatatacctgtgttcggtgaccttggtaggtacctgtaggaacactgtaatagttccccttgtaggtaatcacgttatccttcctgacatgatggggtaaaagctttggggaagggattgtcggaattccccgataaggcatgagatggggtctttccatctcgaactccactgatgggatacgacgtatgccatgatgctccataccgttagcagtacgttgcaaccatgcttgaacctcctcgttgagttgctctatggaggtaaattcacgtccccggagaaaattgtactttacgtacttcactacgttctctatctttcctttgctttcgggatctgatttacggcagaacaccggctcgaacccatgttcacgaaccaaggctcgaaagccgtgggtaagtatcaggtctcctaggttctccttgacaagaaaaaccttgtcctggtcataaactattttccgaggtactcccgagaaatattcaaaggcaagttcgtgggcataaactgcaagatcggtagtaaacggggtacggctgaaataaataaatttataacggctacggctaagactcattgcaaaaaaatatactttcaagggtatgccttgcgaagtcttcatccagcgttctccaaaatcgcattgggcatattgaccataaggtgtttccggttgcttctcataaggacggtaactcttttccaattctttgggcagattatgattcagacgtactcggttgacaaagttggataccgttttagctgtgacatggggaaggtctgtaaaatgttcccgtaaacggtcatggagttgcggagatgacaaaaatggccatttgcgtaactctccgataacataagcttcataatcatcaagtttatggctgtatcggcgctcgtaactttgactctgcttaaactcttcttctgtcatagacagatacttggacaccgtttgacggtgaagacctaatgatatgcctatttgactcttgtttaggccatttgaaaataattctttaactttgtaccacattagatacttctgtaatttggaagtctcactcatagcattgtgattagttgttgacaactctaatttacaatgctattttcttttattctattgtcgattttacttttccgatttttgacgatacaaaattaccgattacaatagtctcaaaaattgaaaaattattcgagcaacttgactatatagaaaattccttagaggcatagagattgcctctaaggaaatggactcaccaatttacaaccttatccacaatcttctgctgttcgctagcagttctccgaagataaatacgggtggtttcgatgctttcgtgccccataaggtcggcaagtaaagcaaggtcgttaaagcggtcaaggaaatttttagcgaaacggtgacggaatgaatgaggataaaccacgtccttattcattccgtatttttcggcaaaatgcttgagttgagaagcaataccacgagtggtaatacgctgtccgaaacgattcaagaagatatagccagatgttaagccttgactttttaaccatttttcggcttctgttcgtagattcttcggaatgtatagtcgtcgaattttaccacctttactatacaaatcaagataacccactttgatgtgttccgctttaatgtggagcaattcacttacacgtgcaccggtagcagccatgaaccacacgatgaaataccactcctcatagccatcagctttaagccgtgctttgagaaatttgtaatcgacatcgctaattacattttccaaaaagttcttttgttgcacctttacgaatttcactttcaatttttcttgtttcgtaaactccaagaacttattgatgccttgcaatctcaggttcacagtctgcggcttgaagttctccaccaaataccctttgtatgccaaaaggttcttcttgttcacttccccataatggttgaggaagtactgtaccgtccacacataggaggtgatggtgttcttggcaagattagttttcgccaaataatttttgaattttgttaccatattacattgatttataatgaatacagtaacaatatagcagaacgtatcgagcattatacgcagttgcccgaaggatggcaaattgcacctatgcaaaccttatgcaaattaaccgatggagaaaagcaaactggcattgaaagaatatatcttgatgtcaaatatttacgcggtgagcgggaggcaaagaccatgatttccggcaagtttgtagctgcaaatactctcttgattctggttgatggcgaaaactcggatgaggtgttccaaactccgattgacggctatcaaggtagtactttcaaacagttgcttatcaacgggaatatgaacgaagaatatgtgctattggttatcaacttgcataggaaaatcttacgagaaagtaaggttgggtctgccattccccacttgaacaagaaactattcaaagcgatagaagtacctattccaccttatcatcaacaaaagaggattgtagaagctataaatattatatttaaacatcttgacgatataatggagagcctataaactctccattatatcgtctaatttggtaaacaatacgttaaccgtatttacaattcttttttgttctgcaaatggaggtaaggggatataggtgtttattattttttctttggatatattgggctgcgctccaccacctcccatttttataaactcttccctatgggataataaaaagagaaacagaaactctttatctatcccattaaagacttcacaagcacaacaggcttgattcgttgtggcaggaaaagttaacattccaatttttcctatagttgctccatacatagcaattaacacactaccagtaggattgagttttacagaagtttcattcaaagctttttctgttatagattcgggaatatgggtaatatatccatcgtttaaatctcccgtttttagccaaggaatattcccattataataatctttgttcagccgatttggtgtactaccagactgccatttgccaatttttccaagcgttgtccaactccaattttgaggtgtttcaaaaggcaactgcgtataatgctcgttatcacaaggtgtgaagccgggatttatgcgtttcaagagttcaatggctggctcatcgttagggtcctgcggcacaagtttgccatgaatggcaaggtcaaggattttgctcttggtttgtttgattattgtctgcatatcgactttaccttgttctatttggtctatcagagcaaaccatttcttgatttctgccacgatacgttgttgttcggaaaggggcggaagtggtatatacaatttatcaagttcaccaagataaacacccgcttgtgcattaccaatacttttttctaaaaagagcgattgaaaaattgtagattgcagtaaatagaaacaatatatatttgatacgtatgtatctattattgatatacttctttgagctattacaggaacagataagtcaaaaatggcaacattaccaatagaccctcctataatacctaatataatatccccattagttatttgagttctcggattttccttttgaaatccaagttcatcagaatatctatctttgtccgtaaaaacaatcttaccattttttatattctgagcacttatgacggtatacccattggagcgtttgggaggaggattatgtgaaccatctgtaagttttttgcaaacattaccaaatgttgtccacacccacgattccggcacctcaaacggcacattctcataatggggcgtatcggaagcctttgtagacttcttgttctttttgatttttccctcttttatcagccgttctttttcagtcttgatacgttcaaggagaacggatgcaggttcatcacttgggtcttgaggaacgagtttaccatgaatagcgaggtcgagtatcttttgacgtaatttcttagtgtccatgtgtctgttagtctttgttcaggaatagattgcaaaactcgtttaactgttgctgcatacgctcctgcggaatgaggatacgcttgtattcggttatcatggttggactcatactacggctcatagcatattccaccaccacatggtctgccgtggggcatagaataataccgatggatggattctcgttagaacgcttcacatcacgatcaagagcttccaaataaaattccaactgaccaaggtcgcgcggctggaactttgtctttttaagttccactgcaaccaatgcttgtaagccacgatggaagaaaagcaagtcagccttaaatgtagaagcaccgatattgaggcgatactcttgatccataaagatgaaatccttgccaagttcaagaataaactgcttcatgtgttctaccaagccatttctcaactttgtttcgctatgtttcttgggtaaattcaggaaatctacaaacagcgtatctttgaacatgactggagcattgggatatgcttcaagcaaaccttttgacatattggttttgctactcagcaattccgtgtatgtttgattggcgatacagcgttgaagctctctctttactaaatgttctttattagcatagaggatataaaacatcctttcctcattactcttgcattgagataatattaccgtatgattggtcattgtggttaagcccaagaccttaggcatttgtcctgttttcgattggataaattgtgcagtttctggctgcacaattagagtggttccttgttgtggtgtggctctcatttctatttgtgcagttcttggctgcacaaattcaggattaagatactttgcaacagttgtaaggaatgcttctgaagaataggcatcataaaatgataccatattataaatatttcttctgctatagccttttacatcaggtctctgagtacgaatgtattctgataataagattactactttacttccccattcctcgcttttgagtttagcagatacatatccacccacatgccaggcagtgagcaagacttcttcattaaccgctgcggtggcacggcttttatgttggagaataatgtccaaaacttctccaaactgttgctctaatggtatagctatattattattttccataaagtttagtcctcctctatattagccaataacttttgcagctctgccacggcattgctgatagtatcgcttttctcctttatctcatccattaattccgataatgagcggtcgtccacttcgccaccttgacgaatccaagtgatgtcgagactggttttgtcgcgagacagtaactcgtccacagcatatttgcgccaacgccctcgtggattattctcggcatcgtatgtttcttttcgttcggctaagttacctgaattgtagcaggaaatgaaatcatccaaatgatggcgttccaatttgttggttgccaaggtatgcttcacatcggtacgatagtcatagaaccaaacctctttagtgggttgcccctttgtaaagaacaatacgttggctttcactccctgagcatagaaaataccagtgggcaggcgcaggatggtgtgaaggttgaaatcctgcaacaagcgtttacggatagtttcacctgctccggcctcaaaaaggacattgtcaggaagcaccatagcagcacgtcctccggttttgagcataagcatcatgtgttggaggaagtttaactggttgttcttggtctccacatagaaatccggacgattgatgtccacagaaccagccggacgagttccaaaaggagggttggcaagtattacatcaacaagagttgacggttctttttccaaagaatcctcacaaacaatcggactacggtctgtaccgataccatgcaaataaagattcatggaagcgagcgtcaccactaagggcgtattatccacaccatgcaaagctttgtcacgcaagaaatcacgtttttctttacttgctgactgacctttcatataatcgtaagctgtaagcaagaatccacctgttccacaagccgggtcacaaactgtttcacccatttgcggattgatacaatctaccattgcctgaataagtggacgaggagtaaaatactgccctgcaccgcttttcttgtcttgcccgttcttttcaagaatgctttcgtagatagcgcctttcacatcaccgtccataatgagccattgctcctcatcaatcatggtgataaccttttttagataaactggtttgtctatcttgttttgtgccttcgtataaattgtacctatcagattatcctgctcgctaagcaatttaagggtctcttcgtattgttttactaaatccagaccatcaagtgctatcaaatctgcccactgataaccagttggaatagccgactcttctccaaacatttctacattttcggcatccatcttcaagaataaaagataggtcagttgggtgatataatcagtgaatccgattccttgtccggcaagagtggttgccagattccatacttttttggtgagcgattgctctgttgtattatttgttgccatttctttatgctgcttttcttaaaactacaaatgtgtaaagtgagtgaagtgcctcgtctgccttctgcatattaccaaacgctctaatcatttgggctgcatgggtagcatcatcttcacgaatatctctgatagtacaagctccgttagaagcgatgtaatccacaatacggctgataacctctcgctgtttgttagttatttcacgctggttttgtcctaaccaaagattgaaaaactgtttagaggtagtaactacgctatccaatcgttcgatttggtggaaagcaaagcgcacaagttgtatgatattggtcaatgcatcgctttcttctttggtagtggaacgccttaccactttaggattaactatggcataagagttccagagttgtttggatgtaaaatgattgtttgccattttgagcctgttctccaaatcctttagcatcgaataggttataggctctccctcattgttgtaaatgatgcgcagtgcctctatttcgtcatagtactttttacaaaaatcttcaaaagcctctgtcgtattttttgcttcctcaatggaaaaccctttggagataagcgtatcttcacccggcatcaatgtattgacgaatccggctgcaagtataagaaggtatttccgagcatccgcatgattggcaagcggagcgactagacccttacgttcattgttaggctcatcagtgcttacaaatggtggaagaatgtctttctccagtatatcgtatattctggtagaaagctctttcatgtcatcatgagacagacggacaaactctttccgttgcgaatcatccgctttattgtatattcgtgcaagcgttgccgcaaggcgtttaagatactcgtcaggaatatagccatgactaatacgttctaatagttccttcaacgtaattgtctttgttgtagagctgtcatctataggtgccactgtttgcgcatgttctgtcacgcctaccgcatcaaccaaataaaaacaatccttgctgaatgcgttcggggtaacattgcggagttgctcatcaccaatagtgcgcactccacgccctttcatctgaatatacaaaggcaatgactccacatcacgcatgaacatcaccacttccagtggctttacatctgttccggtggcaaccaatgtacaggtgacagcaatacggaaatccttgtcgttacggaattggcgtatcagttcgttactgtcgcctgctgaataagtgattttctgaacaaagcggtcgtcagtccgtccgaatacctctttagctatctgtacgatatttgtggcgtgagcttcattgagagcaaatatcaaggttttgggtaaatagtccatattcggctcacgttgtgggtcattaaacaattctgtataaaccacatcccgataggttgaaaggattaactttatctgtgccggattaatgacactccgattaagttctttattggtgtaggttttggtttccttgttactcacagtcttgacctcacccgtatatcttgtttcttcctttactctttccccctctaatatggctcccccggtttccgtaacttgcgtttttattcgatacactctacaatccacattcacaccatcaacgatactcttttctaaggtataattgacgatgatattatagttaaagaatttctttgtctcttcaatcggggttgctgtcaaaccgacaagtcgagccgtatcgaaatactccaacaccttacgccagttcccataaatggagcgatggcattcgtctatgataatcatatcaaagtaatcgtgtggtaaattgggattggaaggcagggttacttcctctacaggttcgttttcatcatcgtcatcattatcctcaatagtttctcctttcaaaaatgagaataggcgttgtatggtagaaataacgacattgctatcagaagggatagaagacgaacgaaggcgattgaccgtaaagatagtattgaaagcatccccgttctctgtcagacggaaagttccaaattctccctctgcttgttttccaagattattccggtcaacaagaaacaacactctacgcattggtgtataagaaagcattcggtaggcagcaagacaagccgtatatgttttgcctgcaccggtggcaagaaccatcaatgcccgattttgcccggcacggaaacttttttcaagttctgtcaccgcctcatactggcaagcacgaagccccttccttttcaatgtaggaagtccggcaaacatatcctcaatccccaacttcttgaccaattcatgtggtgtaggaatagccattatctgcttgaaacaagaattttgttcacgaaaatcacagcaatatagtcccttgccattcgaggtgaagataaaaggcaaaggcttttgatatgcctgatagatattcggtacacttcttgcgtataagattgcttgctcgcatactttggatgcaaaagcgtctgtttcttcacgcttggcttcaagtacacctactgctttcccattaatgaaaaggaaataatctgcctcaagatttcctttcaataaaccttctcttatggctacagccgtacaagcaggttcataatcctccctgttgactactttccaaccagcatcggcaaaccactggtctatctttattcttgctttttcttcaggagtcatgttcttgatattgtatattatcggaagttcatagactcatttgtaataaactgtaaaaagtcttagagcctcccaacttaattaaatgattttataatgcaaatatagcgaattatattcgataatagtgtctatttgcgttaaggaaagtcagttgttaaatgagttatacctcaaggtaattgaatttagacatataaatcttcatcgcttctttccttttcggttgataaaccaaagaagtcctccccaaaacaaaacgtttgcaccaactaacagaatatttgtcagtgtattcggtgaatcaaagcaaaacatcagactgaacatgaagagaaacatgacagccgctgaaactataaattttacaatctgttccatcatttgctgcattatttttaccttcctaaaaaggttggtccttttaattgtttatttacaaagttacttttttctttgacaaagccattagctttggaaaaaaatgtctgttcgcatcccttcacgctaagtttaaaatctgactggtttaacggctacatcttccaactggcaaaaatgctcatatttgaaataagtatgaatatggtatggaatactcccattttcatatatggcaaattgtagtcaaacagtatacaaatactagtcaaatatattcgattgttatctttatgttatctttgatatatctttgtcatggttttgtcatataggtgagtgggaggggagatagggaaatgtgggacatgagaaggtgtttgtcggcagaatggcgggtatagtagaaaaactatatttttcatctgaggtttacgatttttttcttaaatttgtagagatacggaaatttactcactgacccaatacacataataatgacacgagggaaacagacttgtaagatactaaaagagattcgccggcagattgctgaggccaacgacattgaatttgttgtttctgaatgtcgctacaagggtgattgcttgggtacatgtccgaaatgtgaggcagaggtgcgctatttggagcagcagcttcgcattcgttctcttgccggtaaggcagtttctcttgccgggatttcagctgcgacgtttgctatgatgatgccgatgtcgtcggctgcggatgcattacgtgattctgtagataatttaagggataccattactactgatgaggagaccattgaggcggtttgtggagatttttgggtatatggtgaattcgaagatgaatatgaagatgctgaacaggaggtaaagcaagtaaaaggagtggtgcagggagcggacactttgtcggatggttttgtctctaaagagccgttgcatggagcgactgtaactaatttgcggttgagagtgggtgttttgaccgaggccgatgggacattcaatttgtttgcccgcgtagacgatacgttggaagtagggtatgtcggatataagaaacaggtgattgctgtaacggaaaagatgcaaactcaaactatcacgcttattccagatatggctttgatgggtgaagtggtggttggggatggtataccggaaggttggcaaggagggaataacagctttgaccttaaagtggtggatgaagagggaaatcgtattggcaaagaaaaaataactgttgagcgaatatggtttgatcgtaccggagaggaacatgcggaagagttatctttggagaacatcgacgaaaaacatccttgtcgggtatattggaactatggcaaagggtttaagaatggagatggcagttggaaaaaagagatggcattgcgaattaaagtggaggggtatgacgttcctgtatatgtcaatgtagagtgtttcaagcataatgtcaggaaaacagtccgattgaaaagcagaaaattgtgatgaaaagtagttgaattatatttttatgcaatggttatgcaggcacttcgggcaaagataataggaatattaagacaccgtctccggaccgacggcaatggggtcacttcgcttgtcggtttctatggttgtccgttgcgttgccgatattgtttgaatcctcaatctttcggtaatagtaaccgctttaaggaatatactcccgaaagtttgtatgaggaagtaagaatagacgaactctattttctggcaaccaatggtggggtgacgtttggagggggtgagccgtgtctgtatcctcaatttattcaggagttcagaaaactttgcggaatcagttggaatctcaatcttgaaacctctttgaatgtgccgactgctaatcttgaaattttgcttcctgttgtagatactttgataattgacattaaggattggaattctgatatttattgtcattatacacagcatgacaatgcccgggttatagacaatttgcagttgatagccaaagaagagcgccaggatgattgtattgtccgtttgccgcttataccgaattataatacagaaatcgaccggtctgcaagtcgcaaagctcttgaaagccttggattctctcagtttgatcaattcacttaccagatacgcaatatttagaaatacagagagtcgtgacaatgtggttgtttgatttaaaaaatgtggataaagtataatgtgtttttcaaaaattatattacttttgagggataatatagcttttagggaatgaaaagaagcaatgcaaactactggatctacattggcatgatggccattttcggcgtgttgatttattttgcgcttagtgccgggcagctttatgaccggccggcagcaaagagtgcaacaaatttgaatgtcgattctttcgaattatttcagagtatcatatccggtaatctggctcattctttgaccataatgttactgcagattattgtcatcttgtttacagtccgtatattttcttttcttttcagatatattggccagccgggggtaatgggggagatattggcgggaattgtattggggccttctttgttgggatatgtctttcctgatttttttgtcgctttgtttccgcctgaatctatgggtaatctgaagttgttgagcgagaccgggttggtgttgtttatgtttgtgataggtctggaagtggattttagtgttattaaagataagttgcacgaaacgttggttatcagtcatgccggtattgtagtgcctttttttctgggagtattggctgcaattggtgtttatcaggaatacggttcccagcaggcggatttcctgccttttgccttgtttatcgggatctcgatgagtatcacggctttcccagtattggctcgtattgtgcaggagcgcaatatgacgaagacatctgtcgggatgctttctattgcttctgctgctaacgatgatgtgaccgcttggtgtctgttggcgatagtgatagcattggccaaggcggggagttttgtcagtgcattatataccattgctttgacagttgtttatattgtgttgatgtttaaggtgatgcgaccattcttgcgcaaattgggcgaagcgtatgtcaattcggaggttattaataaggcttttgtcggttttatttttttattattggtcgtgtcatcggttgctacagaaattatcggtattcacgccttgttcggagcctttatggcaggggtaatcatgccggcaaatatcggattccgtaaggtgatgatggaaaaagtggaagatgtgtcgttggtctttttcttgccgcttttcttcgccttttcgggtttgcatacagaaatcggtttgataaattcttgggaattgtggggtgtttgcctgctttttgtcgtggtggcaattgtcgggaaattgggtggatgtacattggcggcaaggattgtaggggaaagttggaagaatagtttgattgtcggtaccttaatgaacacaagggggttgatgcagcttgtggcattgaatatcggccttgaaatggggattctttcttcgcagatgtttgttgtgttgctgattatgtcgttgctgaccacttttatgactactcctttgttgtcgctggtggaaaggatctttgcaaaacaggcagaaaaaacatctcataatgaaaaagtgatgttgtcgttcgggcttccggaaagtggaaggactttgttgaatatggcggatttgttgttgggcgatcgcttgcagaccgggcagttgatagcaacgcactttactgtgggcacggagttgagtccgacgatggcagaggaatttaaagagcttagttttatacctttgcgggcagaggcgaagaagttgagtttgaaagttgaggaacgttatcatgtgacagaaaagttgattcaggatatggtgcggatggcgaaacgtgagcatgtggattatctgtttgtgggtgcaggccgtcagtttatgcaatccgaaaatgctgcggaaagaaagacgaattcaagattttcatttttaccgggtttgtctaaacttttgaagtcgccatctttatcattgccgggtttgctgttgcgtcagaaactggaatctattatggaggaggtggattgttctgttggaatatttgtaaaccggggttttacaaaggcttcagaaatattgttgttggttgacagcgagcaggatttgtttctgtttaattatgcccgtacccgtttgggcgagaagagtatgacgattcgaatatgttttgccgacaaacagcatgattcttatttggaagagcgtataatgaccgattttgtgcagcaggattcggcgaagttcgttttgggcaaaccgcttggcgagataatttggtctgatgcaaaagagtgtctgttggtaatgagctatgccgcttgtgaaaaactgtctcgcaatcatcagctgtttgcagtactcccttctttgctcattattcgccctcgactggatgaggaagagtaatttaaaatatcgttggactaccaattcgttttgtcaagtcggtataaattcttatttttgttaaaaagataggagtgaatgttagtctatgacatgaaataaatcttaatagacttaacttaattggaactcagaatactatacttaactactaaaataataaaatatgcattattcgaatgaatttaaaacaatgcttgaaaaagcaaaggaagaaaagttagaatatatcggtacgggcaatcctgatgccaagattttaattatcggcaaagaattggcatttgatacatccaataccaaacaatataatagagaaattaagaataatatctctgattgggaagaaaatttaaataagcaatgttcccaagacgatgtacctaattgggaagatagtaattcatctaatccagaagataattataatcccctatatccatataaaggtaccactcaaaaagaaggacatacttggagtaaatatcaaaagctagtggaatggatccgtgaggcaaacgagcatgagaaaataataaattttcaaaagtatgtctttattactgaatacaatatcaatccgtctaaaagaactagcaatcaagacaaagtagcgaagaggaaatccataaatcaaagaaatgaattttttaaaacaacagatttttttcaacaatttccgatagttattgttgctgccggagattatggagggaaagattttggggtgtctttgagtgatacatttagtgtggaatacaatggtttttgggaggtgcgggattccggattgactaatgtctttatagaaaaaggtgagaaaaaagagactaaccaatggttttcattgcactacaataaagagcggacaaaaattgttgtacataccagacaattaagtagtaatatttcagatcggttactacaggaaattgcgaataaagtcaaggaaattgtaaaagaacaaaagatagaattatcgtaaagcattttacatacctattggcggaattgatttaatatttgttcaatcctgccaataggtttttgtcattaatatattacttcttttgggtacacaccgtttttgatgaggtgagtggagcatagctcaatcgtttttatataagttatacatatccgaaacccattgtttcatagtctggcgtagagaacttggtgatattacttctaccatggcaccaacatgaagcagtctcatgataaagtcgtaggtcgggactagaaacagttcgtagtctgtatattcactgttatgttctaataatttttggcttgaatggagtggaagtgaatttatataaggcacatgaacttgatatactcgaataataatatgctcagcttttaaattgttatcaacaacaataccgtaaaaattggagaagtagtctgatgcggaaaaatttgagggaagtttgaacgtttcatcggttatggtcaaattgtctatgcggtcaagtccatagattctgatatcattataatgagaattatatgccagaacataccagcggttttcaaatagttttacgcagtatggttcgatgggaaatgtgtaactttttgttttgtagaatccacagtaagtgattattatgatatggttccctttcatagcttcaagtaatgcagctagatgatgatgggctgatggaattttgttgactagaattctgtcttttaatgaaaggttttcactgattaggttacttacagcaaatgaatcaagcatccattttttaagttcgtcttcatcaatatcttcaggattttcgatataatataggtatccacctgccctttggcaggagataatgattccaaattgatctaaaatagcagctttccaacggttgaatgtggtacggcttaagggtttgtagtcacttaagtctttattgcgttcccaacgtttggcgatttcttctaaagatatttttccggctcttcgaatggtgtcaatcagccatgtgtatttttgaagttgtatcatgatttttttttattagtcgttgtaaagttagtaaaaacatgtattaataaatgagacaccctcaatatatttttgtggcataacctaaaatggcataaagatggaacggcaattaatagcaaggaaatcaatggcttgtaatgggttaatatgtgatttttttgtttaatttttttactaagttttgatatgaaatttacacatttacacgtacactcacaatactccattcttgacggagccgccagcatttccggcctgatagataaagctatagctgatgggatgccagccatatcgcttactgaccacggcagtatgtatggtatcaaacttttttatgacacctgtcgaaaaaaaggtatcaaaccgattctcggatgcgaaacatacgtagctcgtgtatcacgatttaacaaaacccagcaaatcgaccgctcaggagagcaccttatattattggccaaaaatctgaccggatacaaaaatctggtcaaactggtttccgctgcccatgtggaaggtttttactaccgtccgcgtatcgacaaagaacttttgcaacaataccacgaaggactgattgtttcgtcagcctgccttggcggtgaaatcgaccagaaaatcatggcaggcaatattgaaggagccgaggctgcagccaaatggtatcaggacctgttcggtgaagactattatctggaagtgatgcgccaccctgctgccgatcccaagcagcgcgctgaaatatatgaccaacagcaactatgtatccaggagaaaattaaaattgccaagaaattaggcattaagctgttggcaaccaacgacgttcacttcctaaacgaagaggatgctgaagcgcacgacctgctgatttgtctaagtacaaaaaaagacattgatgacccgaagcgaatgcgctatacccgtcaggaatggttcaagacaacacaggaaatgatagacctcttccctgatttgcctgaagcaattgccaatactcaggaggtaacggacaaagtggaagaatatcaattggattctgaccctctgatgcccgtttttcccattccacctgaactgggaacagaagaggaataccgcaaaaaatattctccggaagatttgtttaatgaattcacccgcgatgagaaaggcaatgtggtgatgtccgaagaggatgcccagaaaaaaataaaaaaactgggagggatagaccgcctctaccgcatcaaactggaggctgactacctgaaagaactcaccatgaaaggtgtcgtgaaaagatatggcgaaaatccggcaccggaaatcatggagcgcatcatatttgaattgcatatcatgaaaaccatgggatttcccgggtatttcctgattgtgcaggattttatacaagccgctagggatatgggcgtaattgtgggtccgggacgtggctcagcagccgggagtgccgttgcttattgcctggggatcactaatatcgaccccattaaatatgatctgctgtttgaacgttttctgaatccggaccgtatttcattacctgatatcgatgttgacttcgatgatgccggacgccaacaggtattggaatgggtgacgcagaaatatggagcagacaaggtgtcgcacattgtgaccttcggcagcatggccgccaaaatggccatcaaggacgtggcacgcgtattgaaactggagctttcagaatcaaacagactggctaaaatggttcctgaagctcctaagatgacgttgaaaaaggcatacaaggagaatccggatcttgaaaaagaaaaacaatctgccaatccgcttatttccaagacaattcaatttgcagagacattggaaggctcgattcgccagaccggagtacacgcctgcggaatccttatcagccgagacccgctaacagaccatatacctattatgcctaccgaaggagagagtttgatgacgacacaatatgacggacattttgtagaacctatcggtttgattaaaatggactttttaggactccgtacattatctatcatcaaaacttgtttggaaaacattaaaatatctcgccatttagtattagatgagaataagattccgttagacgatgaagagaccttcaaacttttctcccgaggagataccaccggactgttccagtttgagtcgccgggtatgaaaaaacacttacgcgccctgcagcctaaccggtttgaggaccttgtagccatgaatgccctctatcgccctggtcctatggaatacattccctccttcatccgacgtaaacacggagaggaaccaatcgaatatgaccatcccatgatggaaccttacttgaaagatacatatggtatcactgtctatcaggaacaggtgatgttgcaatcgcgagccctcggcaacttcactcgaggtatgtctgacacattgcgcaaagcaatgggtaaaaaacagtttgaaatgatggcacagctcaaagacaagttcatggaaggatgtaaaaataatccggaatttgtcaaaggtgcgcaggaaaaagggaaatcgatagaagaccttgtcaacaagatatggggagactgggaggcattcgcatcatacgccttcaacaagtcgcactctgtctgctatgcctatatcgcttaccagaccggttttctgaaagcccactacccggcagaattcatggcagccaacttgagcaacaatctctcggacatcagcaaggtgaccattttcatggacgaatgtaagcgcatgggactgaatgtgcttgctccggatgtcaacgaatcgtataatgactttaccgtaaacagtcgcggacagatccgattcgggatggctgccatcaaaggcgtgggagaagccgctgtagaaagcattatcaaagaacgggaacaaaacggccaatataaagacgtatacgatttctttgagcgaatcgactataggacagtcaataaaaagactcttgaaaacctgattacggccggaggactggacagtttcggctaccatcgtgcccaatttttccgaccgatagatgctactaccaatgtcttggatactcttgttaattacggacaaaaaaacaacaagatgccttgaatttgcaaacatctctctttggtgataccgaaggctttgaaatagccaaaccagcaattccagattgcgaaccctggcacgattaattagaaccatacaaactggagatgtagctgatttgcaagtcagaggaagaattaaacaagaatcaggaagatttaaaaattaaaatagaaggacaattttaatgtactatcgctattgaggcaaaacggataaaggttatggaaaatttgaataaatatcaaagtgttgcaaacaatgttgaagctttggggacagtaattcccaaatatctttggcaggatactaacaaagctttgcttaaattgaaagaagctttgggaggtgatgtaagtggttatgttgccaatagacttcatatgaatatgtcagaactttctgatgctttatcggcagaacaagtggacggagtggcacttgctatgtacaatattgaaaaacgtgctcaggctgtaattattggagatcagacaggggtaggtaagggaagacaggcagctgcgatgattagatatggacttttgtctggatatttgcctattttttttaccgaaagatacactttgtttagtgatatgtatcgtgattgtaaggttttgggcattaaggatgcgcgtccgtttgtggtgaatgccggtgcttctgtagtagattttgatagtattgttgaagagatagaagatgatgatactcaagatgaaatatggtcgcctattgacgatgatgattcaaaacatgaagctgaattgatgaaactgtatcagaaacaatatgaaatagtctataaagctcctaaaaaggaggtccttcaaaatattatagcctcaggggatataccgtctgatagttttgattatttgatgattacctattcacaattaaaggatatcaagcgtaatatggctcgtctgggatttttgcagtctttgtgcaaaaaacatcatgtattatttatttttgatgaagcccacagaagtagtagtgtaacttcaggaaaaatttcagctattacgcaaggtgttaatcttttattggtagaaaataaacaaacaccttgtgtatttctttctgctacatttgcaaaacgcccggaaagctttattacttttacgcatagaacggctcttagtgctttggcgactgagcatacattggttaaggcattacatagtggaggtgtacctatgcaggaatttgtatcttcaactttagcagcagaggggcagatgattcgcagagaacattcgaatgaaggaattccttctccaatatacacttaccttgatgatgatatagtattacactcagagttatttaataaggttatgtacttttttcgtgagattgttaaattgtctgaaatggttagggagactgtgcgttttgggcaaatgttaggggaattagtatgtttcaaatgctttccgacacgggctcaattgttttatgtaaataaagtattgctcttggcactaaaagcacagaaagttgcccaaacggctattgataatgttaaacagggacgtagtgttgttattggtatgagtgatacattagaatgtatactatacgatgttacggcattggatgatggctctgtacgtggtgatatgtctgctcttttacttcgtctattaaataagactgttaggagtactattgatatcaatgattccttgcgtcttttgggtgaagctgttgacaataatattgaaaatgacaaagatactccaatttttgattggaaggtagaaggcaactctgtagaagcgatgaaattggagtcaatgttagatgagctgagaatatattataattctataaaacaaaacatggagaacgaggtgtttcatctcccgatgtctcccattgatgttatcagacaattgatagagcaagaatattttgtggctcctgatggaatgagaactcatatccggtttgaggaatgcaccggtcgtgcccatcaattggagtatctttctccggagggagatgacgattatatttatgcgaggattcttcctcgaaagaagcgacattctaaccaaatctttaatgatttccagaataataaattggatgttattttaattaatgcatgcggagcaattggtgcgagtgcacatgctgtatcaacgaatgaagtccctgaagaacaagtacgacaacgtaaaatgttgattgtacaaaatgaccttgatgtgaatattgatttgcaaaagcgaggtcgtattaacagaaccggtcagagaatggacttacctccattgtatgaatatattatcacagctattccatcggagaagcgtcttaatatgatgcttcgtgcaaagctacgttctttaagtgctaatactgcagcatatcaagatcaagaaaaagatcaggcagattttatcgatatcagcaataaatatggaaatgaagttgctatggaatatctgaacgaacatgaggaattgggtctggctcttggtataaaaagtcgtattactgcaagtacattacttgctagaattgccatgcttaatgtgaatgcccaacaggatattgttgatgaactgatggttggatatacaactcttgaggcagagttgagacgtattaaccaatgggatttggaacgggaattcagagattttgaggcagagtttgtacgtgaagagttgttcacaacagcaaaggctgaaacaaaacttggtggttgttcctacctgacaacatatcgttgtaagcaaaagactttcccttatacttatgagagattgcaagaattgtgcaaggatgcccaggagagatttggtgtgccgtataaagataataaagatcttcagaatgaaattcgtcagtattattctcgtcaacgtaagattgtatgtcagcgttttgatgagcgcagaaatttgttgtatgcggatgctgtacgtattttgacaaattactgtcaagataagaatcttgtaagtaaatggctggaagttgcgcgattgccctatcaacaatggagtaaaaaagacatggcagaggtgaatagtcacgaaaaatccaaacagattattcgcaaattgacctcttattccaatgattataaccatttgttggatagagaaaaaagggaaatgaaaagatatgctgtagagaagaaacgtcttgtagaaattctgtccaaggcagttattggaaaggggttttcagatataagtgaccaggtttcgagtgaagagagtcctaacaaagtgatagctgtacttcgtgatattcgttttggtaaagatgctaaaaatagattcttgccgagtcgtgtcgaatttatatttgctttgactgctgtttttactgacatcagaataaatctggtccataataaaaaatggagtaattacgatcgtttgagtgagattctgagttcaccggaatggattcaagatgctggtgtgtgggatacggaaatcgcaatgaataataataaaattgtcgaacgtaagattattacaggtaatattcttggagcatttgtccatcctgcccttgaagaattaaagcctcgttttattacgtttaccttgaaaaataccggaaaaacacgcatccaaaatggattgttgttgcctttggatgaagcaaaaatcagagatgcattgaagtatgtatctattccgttacatgagggtataaagtatgcaaataatagcaatgtgagttattgtattacgggagttgggatagacttttcacttttacctttcagacttactgattcagagattcgttttgtggtaagtgttaaaaatagccattctaaatcctttgaggaagataagagattcgataatataaggaatagctttcatggtagtgccgtttcttctatttatgagaaacaaagagatggcaaaagaaaacgtaaagtactcatgcattatgaaaccaaacggttagtttttgagtcaggagaatttcagtctattattcggtgtttatcttacttggatgcagtgattatggtccctcgtgagcagattactatcggagatactaaaaaatatatatctcagtctgtatgtgatgataatgaagcatggcctgaattagattggaaaagttccgatgaaattcctatatcttctgttcctgagaaacttttattgcgtatttctgaaccagttcttcaaactcatcaaaaaggcaaggcggtttttaggtattcttcaatatatctgttagcaaaaaaaacaatggaattattgggtttgtctttgaaagtcagaagttctattgacgttttgaggaggacatatatgcaatggaaaagtattgatctccaactagaaaaaaatcgtattataacgtggacagagcaaaaggaggtgtataataatttgcaatatataattgagaataaggcaataatggacaatgtggtatttgcttccagtgctcttaatatactacaaaaagtattggacagtgaatatttagaatcagatggtttgctcatttctcgctttgaggaagaaatgctgtttctgtctccggatattgtagaagcacagtgttttattgataatttaccttgtacatctcgttgggatggaatgagaaagagtattcaagattatattgatggaaaaacagatatgataaattctccagatagagtttaatatgagttatataggaattattggagcccaaagattggatcgatatattgcttcaagcggtttggttgatgcatataaaaaagcagtggagttgcagcataaagggatggaaatgcatctcgtaaaaaaagaaacagggtgggagacgggatgcgatggaaagtggcggtatgaaatagaggatccgtttcacactacgttgtggatagaagattatgtcaaacggtattttggagaacctataaatattcgatattgtatgcgcaatacggatttgcttgtggcatatccggaatttgagcgtttacagttgtttgctctttatgctaaaaccagcatttggattggttattttgatccgaaacgctatggtatggtggtgtgtatgggaacaattaaatcaccttttgaacaacagacagaaggggttcttttacatgaagtacagcatcttatccaagatgttgaaggttttgctagaggggggaacttgtctttgggttatgacagatactttagattggcaggagaagttgaagctagaaatatttgtttgcggcattttctgtctgatactgaaagaagagagaaactgagaactgatacacaggatgttaaagatgaggagcagatagtgcttttttcatagttaatccgttttggagtattaattggctgatattgtgtaaatccaatgatttaaatataattctctattctctgtattttttgctgtcgatgcattgatatggcatagctactaattataatgaccaaattctttaaaaggcaattctcaaattaaaaatatagtctatgtcataattatatgatttttgtgtaactttatattttctacattggcatagaaagtggaggtatgcggaactatatactcaatccgatagagaatagcaattctccgaacatccgtttggtttgggtctcgtagccggtacgtactccaacatggatgggataggtcagacggaacaagtgggtgtcggttgtcagttcgatgccgtatgaagaatagatgtatttgtccagacgatgcaggctgctgccgaggtctatgaagaaacatccgtcaatctgtttgaaatagagtagagaactgatatgccaatccgggaatagcagtggcaggtggtaagagccgcgaaatgtggcaatttcgtatccgttgagactgatgccgcggggataggagattttattgctgtagttgcgtgtcttgccggacatgtgttgaaatcctccgtaaagcgagagggagtggttgacacagaagccggggagatagagacgaccggcaatccaccattgttgcccaagattcaaaccatgtgtcagcgcatgggtgaaaccgccggtgagcatttgtccccagcggggattgatttcctgttcggtcatgcgggtttggttgctgtatgtaagaccgtattccatcagttggtagtaacggttggcttggtagatgtggtaatcctgtttttgtaccggatagaggattgctgtgttttcttgcagttcataaccatatacctgtttagggcgttgatggtgtatcccctctatctggtaacgcagatatggacgtagagaactattgtattggcgggatgagaggttgaagggaaactgtatgacaaaatctgccgatgaacgttgggatttgttgaatacgtataaggcgtctttttggcctgtctgcaggttgagaccatctgcaaaactttgaaaatcttctcttccgctttcgaattcaacactcaaaatgggccaccagccgctgtaggtgaggttcaggagccagtttccgtgtttgtatcctgactggcgcacatatcctgcagtaaaggtgagggtactaagtttgttttgtgagtagatggttgctcctaagtctacttccattggtgtgaggctggcatagattggtgcccaactgtgaaggttcaccaaatgggtcaatttattatagcggcgtgtcgggaatacactgtcgtatgtaaatgtctgctgccattgttcctgttttgccatttcatttgctaacggataggtcgtataatcaactgcttctgacgttagttgttgaggtgttgctgtgccaggtttgtagccgtcggaggtgtagaacgaaaagtaaagtcggttctcttctgaatcaaatgaggggaaacggagaccgaatttgctgtctagaatttttttataagtgccgttttgcaagctatagagggcattgtttccattgtacgacgcccgatagatgatatttgtatcggtaggttgcggattgtccagttcgtaatatatatcttgagttattttttctctattatgggtggtaatgtcaatggattccaggcgaatgccggctggagcttgtacgacggttaggatttttccattatggtaggatgggtgaataaactgttcgttgtcttcagcttccattctccatagttcgtgttttaaggtggagtctgtcaagacaaggtatgaacgattttgtctgtctgtttcgacatacccccatttgtcaccggctttgaacggtgaaaattggttgctgcgtccacggaggcgtgtgtattttttccgtttgatgtcgtagctgctgatgcgcattttgcctgcctgttcccatcggagatgcgaacggtattcgctccatacaatccgtttgcggtcggtggcaaatttatagtcataaagcagaccggtgcgggtaatccgtttttctttgccatgtatcagtatgacaaacgaaccggtttcctgtaatcccattttataggcgagaacggtatctttgcctaatgctgtcggataatagtagtttgtgtaatatttgttgtgggttggtactgtatcaaaagtgtgggtacaattcgctgcttcgcgtttccagatttgttgtagttcggaatagttgtcgcggtatagcatgcgtttggtgttgtagaaatagtttgctttttttacactgtccgggttgtgaaacaaagcacggaaggagggggtgttccatagactgtcgcgtctgtttccgattgaaagagtcagacttttgtcaaaagggttgattccgtatgggcggcgaccgcttcgttcgatggctttgccccaaatatccgagccgtagtgatggcgggtgttggacaccatgtagtaacccatgttatagcggtttggaacataatctttattggaaccgagtactgctttgtggaaagagtaaagacctttttctacaatctgtgctttcatttcattgagaaattccggagagcgtccacgccctaaatgacctacagaagtttcaaatgttacggcatccccttcaacaaaccacatgggcaggtatactccgaaaacagctatcgggaatatttcaccgaacaggtatgacaatcctttggtcagcccttggttgactttgtcaaattggatgacatggcgaaattcatgcacacagaggtgttccagccagctgtcggtgggctcttggggtggggttgtataaagttcgcttttacgaggagccaaggatacatttccgttagatatacctccgtctgcgtgcataatcatagatattctttttggtttaaggcggagggtattggcatggttataaaggcggtgatatatgtttgcagccttttgggcacttccttcaaaaaaatctggatatataatttgaaaattctctgtctttatttgcttccagcggatagaagcgcggtcctgcccgaaattgacaaattgggcagaagcatgaagcgttgaaattagcaatatgatgattacgagcgctctgtttatcatgtaaatagggttgtaatttttaagcctactaaaatagaggataattttcaataatgggcattcttttcctattttttatttcattacttttgtggtaggttttaatcgattatgacatggataaggataggattattgaattaaggaagttacttgagtatcataataataagtattatattgataatgctcccgaaatttccgaccgtgaatttgatgagctgatgcacgaactggagcgattggaagcaatatatcctgaaatgtatgatgtcaattcgccaactcagcgggtggggcaggatattaaccgtgaatttaatcaggttgaacataaatatccgatgttgtcactggggaatacatatagcaaggaagagttattggattttgaccaaagggtgagaaaagtggtggggaataaagtgcagtatgtatgtgagttgaagtatgacggcacctctatcagtttgacatatgtgaacggtgagtttgtgcaggcagtgactcggggggatggtgtgaaaggggatgatgtgactgctaatgtacgcacgattcgtactgtacctttgagattaaaaggggattatccggctgaattcgaaatccggggtgaaatattgatgccgtttgcagtgtttaaccgtttgaatcaggaaaaatctgaagcaggcgaggcattgtttgcaaatcctagaaatgctgctgccgggactttgaaattacagaattccgcacaggttgctaaacggcatctggattgtttcctttactatttgcccggcgaaatgacaccgtctgatacgcattatggaaatttgatgaaggcaaaggaatgggggttgaatatagctccatatttacaggtagcagactccattgaggaggtgtggtcgtttattgaaaaatgggataaggaaagggctgatttgccggtaccgattgatggtattgtcattaaggtgaataatattgagatgcagcacttgttggggtataccgcaaagtcgcccaggtgggctattgcatataaattcaaggcagagagggtagagaccgctttgctgaatgttgtttaccaggtgggacgtaccggtagtgttacccctgtggctaatttggagcctgtccatattgccggtacgatggtgaaacgggcatctttgcacaatgcagatattatagcggcattggatttgtatgagcatgatcatgtgtatgtggagaaaggtggggagattattcctaaaatcgtaggcgttaataagagcgcaagaatggagggggccggtccggtgaagtttatcactcattgtcctgaatgtggggctgttttggtgagaaatgagggggaagcgaatcattattgtccgaatgaagagcattgccctccacagattgccggaaaaatagagcattttgtcagccgtaaggctatgaatatagaggggatgggggaagagaccatcgatttgttgctcagcaagggaattattcgtaatgtcgcggatatttatcttttaccggatatgagaagtgtgttggtgggattggaaaaaattgtttatccggagagttttgagatgacgagcattccattgtcaaaggttatctatgcttttgaaataggggtgaaaaatatatcttcgcgcttggcggacgcattggccggtcattttggcagtttgtctgcttatgctcaagcagacaaagaacagttgatgaatgtgatagatgacgagggtgtagtcaatcgaatactggaatattttcggatgccttttaatcaggtaagggatcgtctggcagaagccggagagttggatgcgattccattggattatgttatatatgcgttaggaataccgggtgtagaccgatataaagctgatttgttagcggcacaatttgattatatttatgaattgtctgtagcgaccgtagaagaaattaccaaaatggagagtatcgatttggatttggctgaaacaattgtgcgttttttcagtaaaaatgaaaagttggtgcgtaaattgaatacattgagtgtttacaggttgcaggaaaaatctgtcagcaatcttattgccggtattgaacgttctaaaaatgccggttttgcagctttgttatatgctttgggaatccgttatataggagaaacagctgctcgtaatttggcaaaacatttccgtagcatgtctcaattgttggaggctggttatgaacagttggtagaggtggaggatattggtgaacagatggcgggcagcttgttgaaatggtttgaaaaagaggagaacagggagatggtaaggcgtctgacagaggcgggtgtcgagatggaaatacaggaaaaagagggagaaagcaatcagttagaggggcaaacatttgttattaccggaactttaagccgccctcgggaatattttaaggatttgatattaagtgccggagggaaagtgagtgattcagtttcggctaaaacaactagcttgttggctggcgaaaatgctggtagcaaattgaaaaaggcagagaaattgggtacaaaagtaattacagaaaaggagttttacgacttgttgaataagtaaatgtgtggtttatggcaaggaatagtgatacaacaaagttgaaagtgataatggcattggcagaagaggaagccaggcgtttggggaatgtccgtatttctcccgaacatttgtttttggggattatgcgtctggaaaatgattgggcaatggatttgttgttgggtatgggaatggagtttgatgaggtgaaagcaaaattggagaagaaagtatcaaaaaatgcgatttcgcaagaagagttgcctcaagaattggattttactttggctgccagcagtattttgcgcagggtgatggatgaggcatggcagttgggcgatcaggatttggaagctgagcatttgatattggctgttttgcggaatcaagcggggtttgtgacaaagttgttgggagggatgggaatcaattatgataatttcaaggagttgttattgcaggaaaagaaccgtatgcaatctgatgacagagatgaaggtcgtgatgaggaagaaggagaggtagaagaagatgataacgacaattattatgatgcttacagaccgccggtgatgcctgggaaacgatcaaagacacccactttggataattgtggcagggatatcacacgtgcagccgaagagggattattggatcctgttataggacgagagcaggaaattgaacgtctggcacagatattgagccgtagaaaaaagaataatccggtgttgttgggagaacccggtgtgggaaagtcggcgattgcagaggggttagcacttaggattgtgcagaaaaaggtgccgcgtttattgctggacaaacgtgtggttgctttggatttggcatctgtagttgccggaacaaagtacagaggacagtttgaagagcgtatgaagttgatattgaaagagctgactcaagataagaacgttatcctttttatagatgagattcatacgattgtaggagccggtagctctggtggaagtctggatgctgctaatatgctaaaaccggctttggcgcgaggagagattcaatgtattggtgctactacattggatgagtatcgtgagaatattgaaaaagacggagctttggagcgtcgtttccaaaaagtgttggtagagccaacgacttctcaggagacgatagaaattctgactaatataaaatcgcgttatgaggaccatcataatgtgcgttatacagatggagcgattgaagcgtgtgtgaaattgaccatgcgctatgtttcagatcgtgcgttgcctgataaggcaattgatgctatggacgaagccggtgcgagggcgcatatccttaatattgcagtgccatcggttatagaaaatctggaaaatgaaatagagttagtcagaaataagaaaaaagaggctgtacatttgcagaattttgaggtagcggctgcttttcgggatcaagaacggcaattacaagatcgtttggagcaggctaagactgattggcaacatgatttggacgaacatcggattgtggtggatgctgaaaaggttgcagaggtcgtggctatgatgacgggggtacctgtaaagcgtattgcacaaacagaaggtgcgaaattattgcaaatgcgggatgaacttgccggcagtgtcgtcggacaagaagaagctattgaaaaaattgtaaaggccattcatcgtaacagagcgggtttgaaagatccgaacagaccgattggttcttttatatttttaggacctaccggtgttggtaaaacacaattggctaaggtattggcaaaatatttgtttgatacgcaggatgcattgattcgcattgatatgagtgagtatatggagaagtatgccgtgtcgcgacttgttggtgcgcctccgggatatgtgggatatgaagaaggtggtcaattgacagaaaaagtgcgtagaaaaccttattctgttgtcctcttggatgagatagaaaaggctcatcctgatgtattcaatattttactacagctgttggatgacggacagttgacagatagtctgggtaggaaggtggattttaagaatacaattgttattatgacctccaatatcggcagtcgtcagttaaaagattttggttcaggaatcggttttttggctgcagagcgtagtgaggatgttgagtatgccagaggagttgtgcagaaagccttaaaaaatacattttctcctgaatttttaaatagaatagatgatgtgattgtatttaactcattgaataaagatgatttacatacgatagtggacattgaactgaaggggttgttgaatagggtagaggatttaggctttcatttggaggtgacgtctaaggcaaaggattttttgacagataaaggttatgagccacaatatggagctcgaccattaaagcgttctatacaaaaatatctggaagatgaattagctgaaattatcatcaagggggatgatttgaatggaaaagttttggaggttgattgtgaaaatggagataagttgactataagagaaaaacgataggtttaaacctatcgtttttcttttatttaattattttcagtgcaaatatctacctgtttttctatgagttgatctaacgaaataaaggattcggttttggcaattcccgggatgttctgcagtgtattgatcagtatatccattagatgttggtggctgttgcacctgagctttagaaatagagaatagtgtcctgtgataaaatgacattcgatgacttctgggattttctcgatttctttcacgacagttttgtattggtgggcattgtcaagcataatgccgataaatgcgcatattttaaaacctaaagctcgtggcttgacgataaaacgtgagccttcgataattccagaatcttccattttttttacacgttggtgaatggctgctcctgatatgccgcattcgcgtgcaatttccaaaaatggtactcgtgcattctttactagataggaaagaattttacggtcaatgtcgtctaattgatatttcatagtattaggttttagtttattcttttatctgaaattcaacaccctgtagagttgtttgcgctgtttataataagctcgtccctcttcattggtaatatttttcacgacattgtcaatgagtgttgtgaaaattgttgcaaatgtaaatccttccggcggatatatttcaggattatgtatatcgtttaattttgcgatatacatgcgggcaatcatttcgctggaaacatcttttttgtacatcccttgttccatccctttttctatattgatttttattttttcgaatatgaagtcagaacgtagttgtagatgttcttcgaagatttccgggaatacttttgataaagtgatggtgattgcagggcttacttcaaaaaaacggtcgctgatttcattgctgacaataagcatgatatcaatagcattccatccttcaaagttgtattcattgaaaatatcttcaaagcattttctttcatattcaagtatggtctttaccatgtcctgtcggtctgtgaaattttttttcaactctccaagacagaggcccactttctttagatgttcttcattgaaatcattgatgccgtaacgtgaaatgtagttgcgtaatttttctgccaatatgaatttttcttctgtcatgatattgtaattgacttttgtgtctcaaatatactaaacaaaatgataggatgtagcagaaatagttgtaaattattattattagatgcattttgctattgaaaatatagttttatgaatcaaaatgtttcaattgttagtttcattcatttgatgtatttttgttctgtgaagttacgaaaagagtgtaatttattggaaatgagcgtaggttaattgctcttgatagtaataggttacgatttagttagttatctactgcattatctttctgcgcattgcgtaaccttcaaagaactcttcctatgcaaaagtagctatttaattcgagattttgatataaactcccgttttttatcccctcattcataagatttttccgtaaaagcggttttgtttgtcggaacaccattgccaaaaacgagttttgaacaatcgtgtgccgactaccgcatagccggagaaaagggcattgcctcacgcctaaacgatgtttagactgatgacgcaatgcccctttcttttgcgtctatgccaagaggtgcttttacgggctaccagatgatttttctttttttgctgtcccttttgccggaagcggaaagtgaatgcagagtgtgtcagcctgcctcatgaatgaaacaggcggtcacacacagccggacaaaccgggaagaatgattgttgccgcccggctggacaagttccgtcggaacggaaacaatcatacttcctttgtcgtggtttgcccttttcacgcttccggtgatgtctttttctttcagacggtttcctctttttacggattttcccctaaagttttttctacctaatctgcctctgttttcgtttacctccattttgcgcctttcagtaagccgcatcagtcagtcattttcgttctgggcgcaaaggtaattccgggattggacgggaaagcaaggtcaagcctcctgttttctgcggaaatctccagcccttcgggtagtatttccccgaaaaaccttgcattccctaatccctaccttttcaagcacccgaaacgaaaacgaccgatgcgacagaaagacgcataaaaaaaatgtcggataaacgagaggcagataagatagtttgaaactcaactccctcagctcttgaatccgcataaaaaacaaaaaaattaaaaacagcgaagatatgacagcaacggcaaatttcagacaagtggcgcaatacatcgggttggcgatatgcggcttgatgatgcgcaccgccttcggggtgttcggcatcctttggggcatcatcagagagattgtaaacggagtgttccgagtggcgataggtgtaatcgtggctatcctttccaccattgcctacttcggcttcatcctttggtcattaactctttaacccttaccgacatgacaaagagaaacagcaagacggtagcgcagcagtgcagatattacgaggtggacaacatcttcgtgtatatggtggaaacgtacatcaacggcaattttgaaacgttccgaagattgtaccacgaactaaacaaagacgcacggagggacttcatggacttccttctcagcgaggtagagccgacctattggagagagatacttaaacagacaatctaaaaacgacagcgatatgaaaggaacagaccatttcaaaagaacgatacaaatgtatctggaacagcgggcggaggaagatacgctctttgcgaagaagtaccgcaaccctgccaagaacatagacgagtgcgtgacccacattctgaaccatgtgcagaaaagtggttgcaacggcttcacgaacggagagatattcgggcaagccatccactactatgaggaaaacgagatagaggtgggcaaacctatgaactgccaagtggtggtgaaccatgttgtggaactcacggaagaggaaaaggcggaggcacgtcagaatgcagtccgcagataccaagaggaggaactccgcaagttgcagaaccgcaacagaccgtcagcgagaaaagaaaaccacccccaaccctcattatttgatttaggcttatgaaaccgaagaccaagatacagaaagaggtggcaagactttcagccaacctccgccccatatcaacgacacaaattgaatgggcataccgccactgcgttgaacatatcggctaccgcaccaagaaagggaacattacctgctccgactgcggtcacgagtggcacagtgacagtggactatgcgacacccttgaaggttgcacctgttcccaatgccatgccaaactcaaagtgcaggacacacgcaaacgtatctacaaggaaacgcaatatttcagcgtgataaccatctgcaaaggctatcaggtaatccgtgtggcgcaggtcagatgcgaaagcaggaaaggcgagccgatgcaattctactgccacgaggttgtgcagcgttggatttcacccgacggtaaggttacagacatggcgttgctccgtggcttcacattctattactgcgatgtatgggcattgtgcagcgcgatggagataagaccgcacaacagcctatacgatgatgttgtggcaagaagctgtgcatatcccaaaatgagggtattacctcaactcagacgtaacggcttcaagggcgatttccacggcatttcccccgtgcgtcttttcaaagccttgctttctgacccaagaattgaaacccttatgaaaggcggtgagattgaggttatgaaacactttattttcaatgcccgtactgccgatgaatgctgggcatcatatctgattgccaagcgtcacaagtatctgatagacaacttctccatgtggtgcgactatttgcgtatgctcaacaaactcggtcaagacctccgcaacccgaagaacatctgccccgaagatttcatggcggcacacgacaacgcaacccgaaagattgaaaccatacacgagaaggaacgagcagagcaacgccgccgctgggagattgaaaggcgtgagcgtgagcaacagcggcaactgcaaagggaaaaagatgcggaggatttcatcgccaacaaatccaaattcttcggattggtaatcacggacgaggaaataatcatcaaggtgcttgaaagcatagacgagtattacagcgagggcaaggcacagaacatctgcgtgttcggcagtgaatactacaagaaagccgacaccctcatactctcggcaaggattggcggtgagataattgaaaccgtagaggtggatttgcggacactcaaggtggtgcagtgccacggcaagtacaaccaagacaccgaataccacgaacgcatcatagaccttgtaaacaagaacgccaaccttatccgtgagcggatgaaagcggcatagcataaaccctaaaacaacattgatatggaagtaagaatcgaaagcatgatttgtgtgtgggatgatgcaattcccacgatgttcattgaatttgtaaatctcctcactctcacaacgagtgaggagggattgagaaggagtgtgaaggagtttgccgagaagcacgaacttgacaagtttttcctttacggcttcggctcacaccatttctacctgcatcaacgctacacgagcaaccccgaaatggtgatgaaggacagagttctgtcagtacatttttaatcatctaaaaagcaacattatggcaacacgaatgaccatcaacggagtaagcacctgtacggaagcaggtacggagaaatatgagcgtttccaatcgggtatcggcagacgcaagcggacacttgtgcagtacgactaccgccatacggacggagaactgttcgcttgtgtcaaacccacattggacgagtgccgaaccgcaaggaacaagtggctgaacgcaaagcagggaaaggagggcaaccgatgaacacgacctatcaaacgctgatagtcaaattcagcgaacctatcacggcattggacggtatctttgacgaagcccaagcgtggggaacgaacaccctcaaagggtggatagatgattacgaaagcacacgtttcaccgccaccgacagccatacggcagtcatcacgagcgagtataatatggagtgtgtgaaagagtggctgcaacgacagacacccattgccgagatgcgagaattttgaacaagttggcggtgtccgcaccgccaacacttaaaaccctaaaacaacggatatgatagcacagacgatattacagcagataggcggaagacgcttcaccgccatgacgggaagccgtgacttcatagatatgggcaacggcttacggatgagccttgcaaggaacaagacaagtgccaaccgccttgacatcatctatgatgcaggggcagacctctacaatatgcgtttctaccgcaggacattcagcaaaaagacattcgagagcagaacaaaggacattgccatacacgagggcatctattttgatatgttggaggaaatgttcacgatggtgacgggactttacacacgcttttgagtggaggggcggcgagagccgccctactttctttcagtgagcatgatggcggacaaagaaagtagcaaagaaacctttgtttcaatcgcttgttagcgatatataaaatattatgagtatctttgtaaaagtattgatactcataatcatagtaatattatgtgtgaattaacaataagtcaaaagcacatcataacagaacgaaataatagtaaaggtgaatatcagccggcgtttatgcagattcgtattcacaattcttttgatggaaacatcgatgaacttgatgtcccaacattaggaactcttgttcatgaatacatccactttcttcaaaatgtatcaactccgtggggactatatgatagtatggttcgatataatataatggcggaaacatatgcttttgtagaaaatgctacatctactatcactctcccattaaatattgattattctcaaggattgaagaataaaatggatattgtagaatgtggaacaggatattgcccactttcagatacacggagaaataattttaaaatagatgtaagtgaacggatttgcatccatagaaactataaaaaggtaaataatagaaatttaccaataataacattagatatcagttttacggatggttcaaaacaaaccattgttttgggtgctaacattattaaggagagtatggcagcattgtatcaaatgctcatagatgaaactgcaactcatgaagaatttgacctcccatataatttaattaagattattgcagaacaacatttttctgcaatagcatctgataatataaaactgataactatttgctatatatctttgtttagcctttctcctgctgaagttctaatagataacttagcatacgcgaatgaaaatccggatttatctgcaatagaattgtttgaacggttcgtcaatgaagataaaatatacatcaagggaaaagcaatgtcagtttgtgacttttttgatactcttatagacacattcaaacaagtcttttttaaaagtgtccgagtcggaatcgattatattggcgaagttttggaacgaattcgtcctgccaaaggatttgttcctatcttaactttgattactgattaccaacccttatctaaggaacgaattaaaacgttaatagattttttaggaatgccttatagctatacagacagtggcgattttaatccaccaccttcatcctcaatagattccgaaaaattatctgatgatatgttggcactaatagggcacaatgcattattttcatatttaacgagattgcacaaatatggttatgtatgcccattgcattcgttttgtgaaaaagaaaagtatgataaagatgaatgttatgatgaaccttggaatgggaaaatgtgccctatgacgattatgggagatgtgatacatattaaagagaaagaagtaaaaattcaattttaacaaaccggaaaacctccgatgaagttgtggtttcatcggaggttcttttgtctatttacatttatgggatatacaacagcgcaaactccgcttttctccgtttgagcagcatggcgtggcgtttacccttgtagttgcagaaggcgatatactcacggtaaatgttcctgtcgccagcttccaatttcttgattaaggtacttttggggagtgtcttgctgcctaacagcttcgccggtcccacattgtaagctaacgtgccaagcaaagtcgaatcaactccgaatttacggaacatggcgacaaatttgcgcaggtctttccgcaaaagttcatccgcgtcccattttgtcatggttcgtgctgaatacttctcgtttggcaaaagtttgtgaccccaacccacgtatggatggtgtttttctgagtgccagccctcaaaatagcgacagcataaaaaagcccgttccataagtggcagacggtagattgccgcctgcccgtccgtttcctcttggcggctggtccgtgcagatacggaacagaccgccagaagcgaacagagcattatcatgaatacacgcatcatttcaacaaggggctgaagttgccgatgggaacgatggtcaaaccgtcatcctttacattccggttgttgaagtcaaattccaactcgaaggagttgccgaagttgtcctccaccaccacgatgaagttgtgtgcttcttcaccctccgccgtgtagtacagacggaacttcccgttctccagcaggtagcggtcgttgggcaggaaggtgatgccgttgtccattttcaactttccttctccctcaaactgaaaatagcggatagtgtaaagcgtgttagcgaagtcgcccttctttttcagctcacagcggatttccaccgtctgcccctttgtcaccttgttctgcacgggcatgacctccaccgtgaagggataggactgttgaatgtccatgtcgtcgtcgcacgatacgagggtgaatgacacggcggctatcaggcataacgccaccgccttgaagatggatgttctcttgtttctgttgttcagtatgttcattgttcttcgatttttagatggttgttttttaatttttcgttgtcagttgcaggtacttgttcaagtccttgcaaccgtcatagagggaggaacggtcggtgacacgctccccgtatcgccccacaagtgcggcaagcgtccgccgtccggcttcgtcacggtcaaggaaacagtcgatgcgcccgtagccgtccagcaatcccgccgccttctccacgttggcgacggagttcagcacaaggcagtcagcgttaccggttacgccaagcgtcaccgcagaaaggaagtccatgaagccctcgaacacgaggcattcgtcagccggaatttctttagccattaccaaagacatatcttttggcgggatgcaacccttgaaatatcggcttctgacttcatagccacctgccatgttcgggaagccgacggcaaaataccgtttcccacgaacgccgtagttaagacggcaacagtgacgggatgcgatggcgtaagggatgccccgttctgccagatactccgtcagcggtgaacgaaacaacggaactgcctccacatcctcaaagacgggttcaatcggcttcgggagataggcgggtttttcccatccggtcaccgtcatgttggcggcttccgctatgaacttcgcctgcgtcctaaagtcatcgctttgcagaaactccccggcaagcgtgaagatgtcgccgcccttgcccaaaccgaagtcgtaccagagctgtttcgccacgttcacacggaaagagggtgtgcgctcgcccctgtacggggcaagataccacagctcgttaccgctccttctaacaggctcatgccccagccgtgcgagaaaatccgcaagcggcatccttctgacagcatctatttccgtcctttccatgcccgtgtcagttgatgatgaacttgataccgaccccgaactgcgtgtgaaacttccgcgtgtcgccaccccaaaggcaacgctcccgcagattggcaagcagggctatacggtctgccacgtagcattccacatcgagcgtcagcgcgccgccgtagatgaaggcgtcccggtcgtgcagcgtggagccgtcatgcagcattttcttcccccaattcacagactcatatccggcgagagccgaagccccagcatagacgaacacgatttttcgggcgtccgacagtatcttgaagtaatatccgccatccgccgtgaactgcgccacgggtatcttggtgtccttataggggttgttcttcaggaggtattcgccaccgaacacccacttgttccccttcttcgtgtaagtggagagtgccgccccgaaactgtacccgccatccttgccgccgggattaaagccatccgccatatccgccctcacctcgataccctgcattttcggcaggcatcgctgggcgtgcgcctgccccgtgaaaagggcaagcgacgcgatgattattgcgatgtactttctcatggtcagcgtacttgaagttcgttgatggtacccgcgcgtaccaaatcctcgttctcaatcacgaaggactggtgacggccgccgttcttctcgttcagttccaccacaaggcatttgtcgtcggggatggtgaacttagccatcgtgaagaccgtgcgttcacttttcttgcccggcacgagggtggcgtagttctgcgctcggagcggcaggatgatctgctcctgcatggcggtacgcttcgccaccttcttgtccacgattttccatgtgatatagtccacatcgaaaggcacgttgctctggttctttatctccgtgtggaaatagagcaatccgttatgcgtgtagatgcctttgagaagatactggatgccgaaacgcttgcagccgatatgcttcacctcccgtttgttctgtttgtggatggacttcatgataaggcgcaccagcatcgggctttcgctgcccagctctttcagatagatttcctgcgcgttgttcgggcggttcaccgtgctgccgtcatggatgaagtcgcacatctccacgttgagcaacagcggttcggcggcgtacttcacgttgaaggtgtagaaactgccgtcttccgtgatgacggacatattcgtttcgttgggaaaatttctcacggtagccttcacgcggatgacgttctccgctccgtcggctttcccggcaatcaggtcgggcgagcctaaatcgacatagcgcacctccgccggaaagatgacgtggacagtcttgtcgtaggtcacttccagaccgtgcggcggtatcatgcggtcgaaggtcagcttgcgtgacagcccgtgatacaggtcgccgtccgcctccttctgcggatagacctcctttgtcaaggtcggctgttcattacttccgttggttgtttcaacggttacattctcctgcgcgtgggcagatgcgatgcccatagcgagggcaaacatgatgattacttttctcattacttttggatttttagtggtaaatgtttttttgattgattattgttttcagtccttttcctgatagagcataaccctgtacccggctttcagatgcacctttacggttcgcattttcttggctatgtactggcttgtgccttgtatcagccccttgcccaagtcggaggcgagctgcgccccggcattggtggagatgttgatgctgctacccaacgaacctcccatgttggcggcgacctccctgacggcgttcatctccatcgagttcgggatgaagatgccgggctgtccgtccgtgtcatagaccgcaagctccacggggataatcgtaccgtcatattccagcgaggtaatctcgatgtcgagccgttccccctgtatcttgcccgtgccgaccaccaccgcattgcgggggattgtcctgcccgccaccgccataggctccagcaggcgaagccttactgtctgcccatccgtcacgctctgcgccccatgcacacacgccggtatggtgttccggtccgatacctctgtagtgccgacagccgtgttgaacccccggttgcgttcctgcgagaaggtggcgacaaactccgcgttgctcatgggctgtgcaaggaaggaaacgatttggcgggtcacttgccttacgggtgtcgccgtgttcttctttcccttctgcacggtggaaggctctgccgcctgttccggctttcctccgttctgaccgcccatgtactttgccgccagctcataggacttctccataagtgccacctgttcgtccatagatgaagtcctgcctttttcgctttccagttccgattccagcgaggcgatgcgctccaacagctcatccatctcggcattgtcgttcttcggctgttcgtagaagttgccgagggtggcgttcaggtcacggtaggcggcagcggaggattggatagtctgcggtgcggcaggctgtgccttttcctccttgccgcccggattggcgaggtcgaagtccgttccgtcctccgttcccgctatctcgcggtcgaacatgtcgctcaactgcccgatggtacggttgcggctctcctgacgctcttccatctccccatgctcgtaggctttcaacttgtcgccgataatctgcttgttcgccttgtcagcgtcgggcatttcggtgttgtatccgtccgttcccggcggttgttccttgccggaggacggggcgaatatcagccacatcgccccaatgaagaccagcaccatagcgggcaacacgatcatcttctgccgtttcagccgctgagcctctgtcagcggttcgcgcccctttttcggctttcccgtgtcgggagcggctttgttctctttcgtcggttcattcttcgtctgttccatatgaataaggtgttaagtgattgtctgtttccaccggggtcggcagttccacccgtccggcgtgtcccgtttccatgcgtgagccgtcgtttctgccgatgtcatagacggctctgccgaaggtatagagggcaagcaccgcgaaggcggcgagcatccccagcatgatgcggcggcgtgtttccggcggcaaaccgtccaaataccctttgagccttgccaccagccgtttccgtttgtcgtggagcttccagtatgcgccccacattgtttttctgatactttttactttccgtttcataatccgttaccgtttgattgtctgtaaatccttgttctcgatgatggtgaagccctcgatggtgaagccattggggttgtcgtccgaccgcgatgcgttcagcaggcggcaggtagtcacgaggctgcgctcggtgacgttgctctgccggatgattttctgcgtggcgtaagtcacggcacggtagggataggcgttgaagtcacacaccacgctgtccaccttcaacacttggttgatgttcccggcgatgatgcggttgtagtaccccttctcggcgaagtccgaataatagtggtacacgctcttgtctgccagcagcaaggcacgttttacgttgtgttcaatcgcgcttttttcaggtgacagcgtgaagaaaagctcgtggaagcggcgcacatgctcccgtgcctccgctggacggttctgcgacagatcctgcgacagcgcaagcatcagcgatttgccgttgtccaacacatagattttctcccgttgcttctccgcgaaacggtaggagttccacacgctccacaccgtcaccacggcgcacagcgagaggaagacgataccgaacaggcgtatctgcctgaacgatgattcgatgtttttaagtgacttaaattccattgttgtttattcgtttttaattgtcagttgattatttcagcagtttcccggcacgtccgaccacgtttcctgcggctgcacccgccacgctgcccgccatgcttccggctcgtcccgccatctggttcacgttgcgaccgtaaccgcccatgcctccggcttggataatccagccggcaacggtgggaatggtgaagtagccgatgatgccgatgcagaggaacacgatatacaccccgtcgctcgaatccagcgagaagttcgggtctgcctgcatccgctcgatgtcgctttgcagcatcagcacctgtatcttcgccagtatggtgctgaacatgtccgacaccggaagccacagatagacctgtatgtagcggcatatccactgcgtgagcgtgctttggaaaccgtcccataccgacagggcgaaggctatcggaccgagtatcgccagcaccacgagaaagaaggtgcggacggtgtctatcacgagggcggcggcttggaacagcagttccagtatctcgcggaagaagtcgcggatgctcttcttcatattgtacattccccggtcgatatacattcccgccatcgtcaccatgtcggagggcgaccagccgagttcctccagttgcttgtcaaattcctcgttggacacgaggtaggcggtttcggggttgcgcaccatcgcctcgtattccagcttgtccttctgctccctgtatcggttcatgtccagcgtttccgcctccagcatctttgccgtgccctgtacaacgggtgagaggatgctgtttatcgtgcccagcaccacagtcgggaagaacatgatgcacagaccgatggcaaaaggacggagcatcgggaatacgtctatcggttcggctctcgccagcgactgccatacccggtaggcgacgtagaacagcgcacccagcccggcgatgcctttcgccacacccgccatgtccccacatagcggcatcatctgctcataaagtgagcgtaaaatctgatgaaggttatcgaactccataggcttaccagtatctttcgttcatgttcccgtacagccccatgatgcggtcgaggtcgttctttttctttgcacgcagataactcacggagatgttcttgttggtgtaatagctcacaaggttgcggtaacgcttcattttggagtagcagcgttccaccacgtccatgcgctccttgtcggtcatggagagcgtggtgatgttcaccacattcttcagttccgtcaacacttcgttgctctcttccagcagtttcgtgtaaccgaaagcgattgccgacagctcttctggtctgaaatttccatcacggagcatcctttggaaactgtttacataaatgtcggtgatgtcgcctaccatcaggatggtctgctgcaccttgcgggcgtccttgacgagattgttcaccgatttgagggcatcgtaatactttttgccctgctgatagattttcaccgtttcctgaaagttgctcaccatgttcgtggcagtcttggaggtatggatgatgtttttggaggcattgatgataccctgcgccagattgcccggatcgcttacgacccactgtgcgcttgccctgcctgcgaaaagcaggcacaggcagataatcattgttattcttgttctcatgttactttggattttagtggttgttattcttctgtcgggtgtcccggctgcggtttcacccgcacatagtcgccgcccggcgagaaggtcagcacgtccgtggcctcgttgtaggacacgtcgatgcggaagccggtgttcatgaacaggttgccgttttcctcctgcaagagataggtttccggtttcagcttgcggcgcagaccgctccggcggaacaccgtcaccttgtaggcttcgccctccttgtagataagcacatcgggcttcccctccacgctctcccagttcccgcacagcatatcacggaggttgtcggccacgtcgcaggattgcagcatcatgaccgccaatccgatcagacacttgctgacttgcagcattttcactgtctgtaaattcatacgcatttttcttttttcgttgataaattcatttttaattgttggttgtttccttgtttctccgcttctcggcaagttgccggatggcggcttcgatgtcgccgcccaacttctccgccagatggtaaacctccactttctccgtttcctcggtggtgtacgccagatactcttctgcactgacctcggtggcatagaccgccgattgtgtgccacccaagcctatccacacctctttgtagagccgtgaagggttgttcgccatgttgatggagagtatctgcgacttctccttttccgtcagtccgagcaacgcctgtatctggtcgaacttgttcatatatttcctttggtcaagcaggattttacaatccgagttgttgatgatgctctctttgaccaccggagaactgatgatgtcgtccacctcctgcgtcaccacgattgcctcgccgtaatattttctgactgtcttgtacatatagcgcagatattcagccatgttcgctgaagagagagccttccaagcctcttccacaataagctgtttccgtacccctttcagtcgccgcatcttgttgatgaaggcttccatgatgatgatggtcacgacggggaacagttcgcggttttccttaatcgaatctatctcgaagacaatgaaccgcttgccgagcaggtcgatgttctccgtggagttgagcaggaagtcgtagcgtccgccccggtaatactgccgcatggtggtgagcatgttgtcgatgttgaagtcggacttctccaccttgatgtcacgctgtgccagttccttgcggtagtcgtcacgcatatactcgtagaaggtgttgaacgacggcacgatgctacggtcggattggatgcgctcaatataggcactcacggcactgcccagctcgccgctctccgtctttgtcaccttgtcgtcctccgacttccagagcgtcagcagcagggtcttgatgctgtccttcttctccacgtcgaagatgtaatcgtcggtgtagaacgggttgaagctgatgggcttatcttccgtgtaggtgaaatacacaccgtccgctccgcctgtcttgcgtcggatcatgccgcacaagccctgataggagtttcccgtgtccaccaataccacatgtgcgccttgctcataatattggcgcacgaggtggttcatgaagaaagacttgccgctgcccgaaggacccagcacgaacttgttgcggttggtcgtgataccccgcttcatcggaaggtcgctgatgtcgaggtgcagcggtttccccgtgagcctgtccaccatcttgatgccgaagggcgagagcgagctgcggtagttggtttcctctgtgaacaggcacaccgcctgttcgatgaaggtgtggaaactctcttccgccgggaagtccgccgcattgccgggtatcgccgcccagtagagtgtcgggcagtcgatggtgttgtggcgcggcacgcattccatgcttgccaactggctgcccacgtcgttcttgatatgcttcagttcctccgcatcgtcgctccacgccatgacgttgaagtgtgcccgtaccgaggtcagtccgtaggaatgggcttcgttcaggtattggtctatccactcgcggttgatgctgttgctccttgaatagcgagatagcgactgcatgttacgggcggacttctcgaacttctgcaaggtttcctcactgttgtctatcagcacatactggttgtagatatggttgcaggagagcagaagccccaccggggaggcgaatgacagtcggcagtcactccggtcggtggagagcttctcgtaacgggtgtcggtagccaccttgcccggcaggtcttccgcgtcggagagggtgtgcagacacaggcggttgtcgccgatgcgcatctcccttgccgaaagctcgatgtcctgcaaggtggtgtcaccttctggcatgagcgagaagtagcgttcaataagtcccgccttaccctccgtccccacgatctcgtcggtggagaagcggcgcagcctgacaagcccgctgtcgttcatgatacgctcgaactgttcgcaggtttccaagaacttggtcgtggtttccctgtccagctccatcgggatgatatgtccccggcacagcgtgctgaaattgctctgcatccggttacgctcctttgttgtcttggtcaggtagaggtagcaggtgtgtttcaggtacggacgctcgttgaagtgacgctcgaaagagcggcttaaaaagctcatgtcgtccttctgaagctccggtttgtagcgttccttgatgaaccagtcctgtttgtgtacgacggagtagtccggcagcaccttgatagccttgcaccagcaactgtgtatcgcctcgtactccgcacccgtcacggtgtaaagttccggtagttccacctcgaaagccaccgtgatgtcggcgtcctttgagatgatgcagccatgctccaccgctaaaagtgggaacctgttttccagtgttgtcattttcgatgtattcctcattgtctttcttcctttcgttgtcgtttgaacagacgggttatccgccgccggttgataaggtatcggggatggctccgtgccgctcctaatttcatcagcccgtgttcgccgtaccgggcgttcagcgcgaaggtctgccatacaaggagggaggacgatgccgcgccgaagccgatacatatccactggtcgataccgaccatgtagaggatgacgaacaggacgaagagagccagcagacctccgcagaagatgaagaggtactgtgccttcaagcccttgaactctaccggacggccgatacccttgttgattgggtattcagccatacattatttattaaaggaagaatgagcgcaggatggtggcggcaacaatcaggaagatgcacgcgccgaaccacgaggcggctgtcttgctggtgtcggggtcgcccgatgaaaacttgccgtacacttttacgcccccgataagcccgacgactgcaccgatggcgtatatcagtttagttccggggtcgaaataagaactcaccatagaggtggcttcgttgatgcccgcgatgccgtttccctgcgcgaaagcggaggcggttgcggcgatgacaagtgccgcggagaggattgcttttctgtttttcaagatgttcttgttcataaactgttcttgttttttgccgtcaaaagggtggatggtcctttgtcgggcggttgatactttgtttctttactttggttttagtggatgcccgtttgtttccacggacgtgggcgtgtccgttgcggatggggatgcgccttgcgtttcctcgccgcgtgggttgatgtcattctttcatgttcatttcttttattgttgtcatacatagttgcgaatgtcgaactcctcgatgttgtccggcacgacgaactccttttcagatttcttcagccgaatctcgataagccccttgatgcggatgcctatctccgaagagccttccatcattttctcgtacaactccgtgccctccatgtcggtgaacaccttcgccgccttttcacgttccgcctgtgtcgcgtccgggtttttggcggtcttgcaggcgtcgtcaatctcgtcaaagctgctgcccgaagcccgtggcgtgtccgaggcgtcctcttccggttcgtcgtccccgtatcccagttcctccggcggtatgctcgtgaaggtctcatcgagtttttcctccgggacttgtgccgggcgggatgcgtttcccgtttttccgtcgtcaaaagtagcctcttcctccgacagctcaatgcctttttccgaagtggcggcttcttgcgtcggtatggcagcggttgtccgggtggatgccatcctgaaacggctctcgccgatgatgtccgccttttccgcagggacttcctcgtgtgccgctatgcgtttagcctcattcccgtccagtgaccgccataatccggcaatgcccttgaagaagcggacaatccgcgtgtccatgatgcgctcgtaaaggagcaggaacaggaaccagaggttgcagccgaccgataccgccagcagaatgtctgtcatgctaattgtgtaattcatatccttccgttttggttagaatactgaattgtaatttcgggcataaaggctctttatcgcatcctcgcactggttgaaatggtacgtcagcacatggtcgatataggcggacagcgtaagccggtcatgcccgattacacgggtgatgcgcatgatacgctcgtggtactccgggcgcacatacgccattttcccctcacgtgcctttacttccgggtcgcggatgaacagacgttcatagtccttctcgcagcatttgtcggttaccgggacaggcgacagtatttccacactcgcctgcacttgggcaaacatacctccgcagtcttgctgtggtcttttttcattcggtgtcatttctttttccattttcaaatcagatcttcacgttgtttcttgtacagttcgttgattctctccttgtgctgttccagatgctggcgcagcacggtatccacatatccgcctactgagatttcccctccggcgatgtcgttcacgattctgaggatcttgccgtggacgtcacggctgatatagacacattggcgggtctttatctcgttgcggcgcaggaacagctcgttgtagtcctcgtcctgccttttccggcgtccactttccctctgcgctttttcccgtgttacgggttgcacaggagatggttccggtgcggcggtgtcctcttcggtcggtgcagctgcgggtacttcctgtgcggggcgcagtgtcccgtcctgtgtgcgccgcccgatggaggctaacagcagttcctcgtcgatgccttccgtgttcactttcctgctgcccatgctcactgcggtctgatgatgtcgcttatctcttcggaaaactcccggatgccactccctttcagcagtgccgtgtccatcgggaagatggtggagcggaaaacgctcttgcgctcttccgaaaggtcacggcggaacttcttgctgtcgggcaagcgggtggaaagtaccggaaagcccatttcggctatcacttcctcgtagatgccgtacaagtcgttcctctccctgccgtccaccatcgtccagaacagatgcagcccctttgttttcgcctgtccggtagtcatcagcctgtcgcggaacatcgtgacgaatttcagggtactctccacgacaaagcggtcggcactcagcggagtgaagatgtagtccatctgcgagagcgtctttatcacgccgttactacggagcgtgccgggcatgtcgaagaacaccacgtcgggtttcatgtcctcagtggcaatcatcctctcggcatcgtcgagggcgttcaccgcattgctcttgacgatggtgtaggcgttctttttgatccggcggaaatggtcgcaagcgagagccttgaagtaggtgctgctgtcgataagccccatttcgtgttcgcgcagcccgtggatgctgtgctgcgggtcgtcgcagtccacgacggcgacattgtagcctttcacgttgtgcaggtagctggcggcaagtgccgtgacagtggatttgccgatgccacctttctgtgttgcgaatgcaacgaagatttccttactcatagttccatttattttaattgttgaagatttctttttctatttatatgcggatttggttgctacattatccgcttcagtgaacagacacacgggcgggtcatcgcgtatccggttctgtggtgaagcggtgcggcgaacaagtgatgaatgacgacactgcgtcatgaagtcattgaatccgtacttcaccggattgtcggataaccggggttccgacggttcgggtatccgcttcggcaagtgtccgaagaagcggttttccgggtatttgaatgttccgtttctcatatcttcaaatcgttggttccttgaatcatgctgcaaataaacaagtatattttggaacttgtatcacttcccaagcaattggcagcacgttgcgccggttggcagtcattgaccgggtcaagcgtctgtccgataccgctttaaggacgtaactttgcccccggacagcagggttcgccgatggtggcacagccggagtcctgaaaggtatcttcccatccgtcccctgacggatttttatgttcacctgaacatagcaaggtatgttttcagccgctcaaaatattttgagcatcccggaaaacgccttgcccttgcagggggcgggctttccctccgaagtcgggaagcctttcaaaactgcggtgctgtaatccgaagcggcggcttatgccgtcaatccgctaaatccaaagtaatatgaaagagaaaaggaaaagcaaatcagggagaaatcccaaacttgatccggcggtgtaccgttacaccgtccgtttcaatgaggaggaacacaaccgtttcctcgccatgttcggaaaatcgggtgtctatgcacggtcggttttcctcaaggcgcacttcttcggacagccgttcaaggtgcttaaggtggacaagacgctggtggactattacaccaaactgtcggattttcatgcacagttccgtgccgtgggtacgaattacaaccaagtcgtgaaggaactgaggctgcatttttcagagaaaaaggcgatggcgttgctctacaaattagagcaacacaccgtcgaactcgtgaaactgagccgccggattgtggaactttcaagggaaatggaggcgaaatggtcgcaaaaatcagtgtaggaaactcgttgtacggcgcgattgcctataacggggagaagattaacgaggcgcaggggcggttgcttacgaccaaccgcatctataatgacggttctgggaaggtggacatcggcaaggcgatggagggcttccacaccttcctgccgccgcagatgaaggtcgagaagccggtggtgcatatctcgctcaacccgcacccagaggatgtgctgaccgatgcggaattgcaggacatcgcccgtgagtatctggaaaagctcggttttggcaaccagccttatcttgttttcaagcacgaggacatcgaccgccaccacctgcacatcgtgacggttcgggtggacgagaacgggaaatgtatcagcgacaagaacaactactatcgtagcaaacaaatcacccgtgagctggagaagaaatacgggctgcacgatgcggagcgcaggaaccgccgtcttgacacgccgctaagcaaggtggacgcatcggcaggcgatgtgaagaaacaggtaggcaacaccgtgaaagctctgaacgggcagtaccgtttccagacgatgggcgaataccgtgcgctcctttccatctataacctgacggtggaggaagcgaggggtaacgtgcgcggacgggaatatcacgggctggtctattccgtcacggacggcaggggcaacaaggtgggcaacccgttcaagtcctcgctcttcgggaagtccgcaggctatgaagccatgcagaagaagtttgtacgttccagatcggagattaaggacaggaaactggcagacatgacgaaacgtaccgttctttccgtgctgcaaggcacttatgacaaggataggtttgtttcccaacttaaagagaagggcatcgacaccgtactgcgctacacggaggaagggcgcatctacggggctaccttcatcgaccaccgcacggggagtgtgctgaacggttcgcgcatgggcaaggagctttcggcgaatgccttgcaggaacacttcaccctgccatacgccggacaaccgccgataccgttatccatccctatggatgctgcggacaaggcacacggacagaccgcatacgaccgtgaagacgtatcgggcggaatgggcttgctcactcccgaaggtccggcggtagatgccgaggaagaggctttcatccgggcgatgaagcgcaaaaagaagaaaaagcgcaagggcttgggtttgtaatcggagtatcaacaattaaaaaatcaatgtatgtcacaacaagaagacgatttgagggcattggcgaaaatcatggattttctgcgtgccgtgagtatcattttagtggtcatgaacgtgtactggttctgctacgaagccatccggctatggggcgtgaacatcggtgtggtggacaaaatccttctgaacttcgaccgcacggcggggctgttccattccattctgtacacgaaactgtttgccgtcctgctgcttgccctgtcctgtctgggtacgaaaggggtcaagggcgagaaaatcacttggggaagaatatggacggcactcgccgccggattcgtgctgtttttcctcaactggtggatactggctctgccgctgccggttgaagcggtgacgggcttgtatatccttaccatcggcacgggctatgtctgtcttttgatgggcgggctgtggatgagccgcctgttgaaacacaatctgatggaggatgttttcaacaacgagaatgagagtttcatgcaggaaacgaggctcatcgaaagcgagtattcggtcaatctgcccacacgcttctattacaaaaagcgttggaacaatggctggatcaatgtggtgaatcccttccgtgcgtccatcgtgttgggtacgccgggcagcggcaagtcatacgccgtggtaaacaattttatcaagcaacagattgaaaagggcttctcgatgtatgtatatgacttcaaattcagtgacttgtccaccatagcctacaaccatttgctgaaccacccggagggctacaaggtgaagccgaaattctatgtgatcaatttcgacgacccgcgacgctcacaccgttgcaatcccatacacccggatttcatggaggatattacggacgcttacgagagtgcctacacgataatgcttaacctcaataaaacttgggtgcaaaagcagggcgacttcttcgtggagtcacctatcattttgtttgccagcattatctggtatctcaaaatctatcagaacgggaagtattgcacgtttccccatgccatcgagtttttgaaccgccgctacgaggatattttcccgatactgacctcttacccggagctggaaaactacctttccccgttcatggatgcttggctcggaggggctgcggagcagctcatggggcagatagcgtcggcgaaaatcccgctttcgaggatgatttccccgcagctctattgggtgatgtcggacagcgagtttacgctggacatcaacaatcccgaagagccgaaaatcctatgcgtgggcaacaatcccgaccgtcagaacatctacggggcggctctcggattgtataactcccgtatcgtgaaactcatcaacaagaagggaatgctgaagtcatcggtcatcatcgacgagctgcccacgatatacttcaaggggttggacaaccttatagccaccgcccgaagcaacaaggttgccgtgtgtctgggatttcaggatttcagccagctggtgcgcgactacggtgataaggaggcgaaagtggtgatgaatacggtcggtaacattttctccgggcaggtggtaggtgaaacggcaaagacactatcggaacggttcggtaaggtgttgcagaaacggcagtctatctccatcaaccggcaggatgtttccacctccatcaacacgcagatggatgcgctcattccgccgagcaagatttccggtctgacgcagggaatgtttgtcggttcggtgtccgacaacttcaacgaacgtatcgaacagaaaatttttcactgcgagattgtggtggatgccgagaaggtgaagcgggaggaacgtgcctacaagaaaattccggtcattaccgatttcacggacgaggacggcaacgaccgcatgaaagaaacggtgcaggcgaactaccggcgtatcaaggaagaggtgaagcagattgtgcaggaggaactggagcgcatcgcgggcgatgataacctgaaatatctgttgcagcagaagtaaataaaaaaatgaagaaaggcttaccataaacctttcttcatttttttagaacttaagcattatccatacttactaagattccgttttccaaaattttttgcaatggaattttctttaagatttcttgataagtgctatagaagtcattatcaagtcctatataaacaatattgtcatgtaattcttctataacactaatatgtgaatgcaatttgcactttttatcagaacaatctgatacgatacttttaattcgttccaacttatttaataaatcatcatattgagataacccttttgtagttggttgtatttgataattagttttctttgccggttgtatattatgttcaggatctaataatactatgtgaaatatagaagaatcccgatcaaaataacctacaatacgccccgtactttttgttatcgaaaattgcattattggaaaatctgtctcattgtccaatatttcttttggtagccaatctaaatcttttcgttgaataggaatgtttttagcactccaatctattggatgacatcttaatgcaatactacctctattttcttctaatacttcttgcggtgtcatagtacccaaagcacctaatctttcaagaagcccaatatgccatcccttagaacactctccaatctgaaaattaggtatctgcttaaagtaagagaaggaaaaagttatcttccttctctttaactcattttcttgttctttggtaactaatgatttgtttccgtatttaggagaatctgaattaagatttaatagtttcccattttttcccataatactcaatcattagttctggagtaataaccttgtcacaacgctcatttacatttaaatctccacgtgtttcaatccaaggcatctcattgtgggacaatcgttctaattcagcaccgctatatttaagataattctccaatataaagtcaatgaattcagcgtcttctgatgataaactcacattgtgattcatgcaatcatcaatattgatttctgaatagagatattttgtagaattaaatcgattgtagatttctcgatttaccggaccatgaatccatgcttcaaactcgccgtcaaacataggttttttattgataccataagaccatgcttgaacataatacaataacttctgcaactttaaatttattaaagacgcaaatctatcttccgattttactcgtaagataatgtagtctgttatatcgtgtattgagttcatctgaattatgactatatcaatttcaatgcaaagttaatatctttttctaatataacaaaataatgaattgaattgatgtgatttattctaatgaatttgttttttatctcctcatacgatccaactcatcatcgcgcagcatcctctcgttcaatttctcctgcattctgtcaaggaagtaggtgcggctttcgttcttccggcgtttgatatcggtgtagaaacggtagcagtccttcgactcaaccccgaatatcttgtaaaggagcggggcaagctgtttgagcggcatgttgccgttgttgatgcagcccatctcgtcgatgccgtagataagttccacgaggtcgatggcattgcccgtccattgcaggaggctggtggcggtttctgttgtgttgttggcggatatcagtggcggcacttggggcgtggcaaggaatttctgcatcttcctcacgaaagacagggccttgctgacataggcggcaatctctctcttttcttctgacaggttgcgcacgggatggtgctgcaactcgatttcgatgtaggcaagcgcgatgacggtaaggttcgcgtccatgctaccgttacacagttcgatcacttgggtggcaaaagccgtgtatgccgtttccatattgcagtcaccggcttcgtttatcaggcggaaaaagtcggtttccgccagcaagaaataattcatggttctgtcaattttgaaaattacactttgttttctgcgtgcgcacatgaatataattggcaaaaaacgcggcagaaaataaaaaatccaacactcaattttacaaagtactggatttcagaggtataaaattcaatattttttcacaaggacaaattatctccgacttaaattgtttgtaatcagaacatttattctattcctgaaaatagaaatgtatgcttgccgcacattttggctatcttgcttttttatcaaggatatagataatgcgacatacaccgttggaatagcttttcaaggaggaaagcgtccagtgttgctctggcagagccgacttaaaaaaatgtcgtccgcttccggatatgaaaggaacggtgtatagtatgatttcatccacagcgtgcatacgcagtagtccgtttatataatctgccgtatccagtgtggcttccgcgaggtaacggatgtttgtgccgtcttttctccattcgtgcagcattgaaatggaatagtccggtgtcacacggtaaagggctttcttcctgatttcatcaagaccgcaacggtcaaggcacaaatcctgatgtgctttatcatataactctgaagaaagacatccgtccatcgtcagtacggcgagaatctgaactttacccataatcgtttcctttcgttaggcaagggtaaaaaagtagcgtgcaattcacactaccttcaagcgatggctctggtaaagcctttacggagagtacgtgaatgcacgctatgcgtaagcatagcataagcatcacgcaatcgtctccgtagttccaatttaccagattttcgcttgaaacgccttgcggtcttatcctatatgttggcggcgaaaagctcctgccaatcgccgtttttctcaaatgttatgcaaagatagccaaattcagtgaattacgggctatgattgcttgaatttatatttaagtccatactcttcaagtttgctgtatagtgttgtcctgcctatgccgagcagttctgcggcgacactccggttgccgtttgcctgtttcaacgcacgcaatatccgctccttatcctccgcgtcattgcgcaaggcgaagctgacagtagaggtcggtttcgtcacggcaagttccagatgctctttcatgacaacaccttcctgcgcctgcaatacagcacccataactttctgccgaagttcccgcacgttgcccggccatgcgtgtgtcagcaacgctttacgtgcttcggaactgaacccgctcacgctacactccagctctctgtttgccatatcacggaagaactctgccagcggcatgatgtcttcctgacagtcacgcaacggaggaacggttatcccgaagtcgtgcaggcggtacagaagatcctgccgaaaacgcttttcattcaccgctacttccaaatcttcattggtagcagcgatgatgcggacattgaaattccggtctgccttgtctccgaccgggcgataccgcctctcctgtatggcgcggagcaacatctgttgggtttccaacgcgaggtttcctacctcgtccagaaaaagcgtgccgccttccgcctcatggaaatatcctttcttggcattgtccgcacctgtaaacgctcccttgacgtgtccgaagaaagccgacggtgcaagctctttggagagtgaaccgcagtccaccgccacaaatggcttgcctgcacgtttgctcttgtcatgcaacagatgggcaatatgctccttacccgtgccgttctcaccaaatatcatcacgctcatgtcggtggcggctaccagccttatccggtgcatgattttctgaaaagcggaaccttcacgggcgaatacaggcatacggcgttgtcctgcctgacgttctttcagtatggaacggatcagggggacaagtttatcctccacaagctgtttgggaatatagtctatcgagccgagtttcatgctttccacggcggtattaacttcggcgtagtcggtcataatgatgaagggctgcatctttccctcctttcgcatccagcacaaaaggtctatgccactgccgtcaggcagacgcaggtcggcaaccacgatatcattatctgttgcctgttgcagatgtttcttcgcggttgagaggtggtaagccttcatattgcggtagccctcccgtgacagcatattgcagacatattcgcaatacacgatgttgtcttccaccacaattatttttgtcttatccatcttcgtattttctcctttcctcttctgccaaccgtattatttccactcccttatccagcacagcagtcacggcatggcttaacgcttcaccatccgggagagcatcgccacgaagcaatccgtaaagtacattcagcggttggtcggcacggagcacctcccacgaactgcgcaggtggtggatcagggaatccagcttttgcaggtctttttcttttgctgcatcccgtaccgcctgcatttccttttctgtttcagttatcaacttttccagcatgacggcttcattgccataggacaataaggcggaaaagtccggtttcccgtccggtgtcgcttttatggcacacctgtcggaaacctccatcagttccgatatggagaacggcttgaacaggcatccggcaaagccttttgccaatagttcccctttgttacaactgcccgaagcggttgccacaaccaccgggattgttggtgaattgcccacgttggacgaacgcaacagttccagcaattcgaaaccgtttataccaggcatattcaagtctgtcagcaacaggctgtattctttctggcgtatcatttccatcagtgccgcagcatcggtgcaagtgtcgcagtgtattccttcttgggaatacatctctttcagcattagaagtaatacctcatcattgtcaatggcgacaacatcatggaatttattgttatgataaacaggtgtattgcttgtatatccaagctgttcttcagcttcctgcatagaaatttcaactgtgaaacgactgcctttccctttcttgctgtccaaacggattgttccgccaagcatcgacacaatattacgcattatggcaagcccaagcccgaaaccctcctttgcagcggcatttgatagacgttcaaacgcaccgaacgcttgtttctgttcctcttctgtcatgcctgtacctgtatcttcaatgaccagtgtcagaactccattatcatattcagtaatcaaagaaacaccgccttcttctgtgaacttgacagcgtttgacagcaggttattcccgatttgtattattcgctctttgtcggtcaatacaatggcatcgtgtccagtcttcacggacaaggacaaccctttgttcacggcaacaggcatgaactccgtttcaagtgtgtgcgtgattgcagaaatccggcagggtgacagacggggctgttccttgccgttgtccaggcggaagaagtcaagcaaagtgttgagcatatcccgcatacggtcggaggattgcagtatattttggatatattgcccattattaccgctattgcattctttccgcaaaagttcggtatagccggttattgccgtcagtggtgtacgcaactcatgggtaatagtatataccgctttctttcgggaggttatgagtatctcattttgttgcacggactgttccaattgctcgatcaaatccgttgtcttgcgtttgtatcgtttaatgttctttgcatcacggtgtatgatgatataggaaatgaccaacagcaaaagaacaaatcccatcaagccgcctatctgcataaatgattttttacgcatggctgttatctcgctttctctattttgtaaatcagattgcaccttcttttcgatttggcaaatcaatccttgcagttgtctgttaagttctgcattacgggcagcaagactatcggcttgttctgacaatcgacggctctgcgcattctgttcgttgaccatgtttctattggatgaacggagcgtagtcgttgttgtcgttggcttcgttccctcttttttgccgaagatgctcaagaaaccttttcgttttggctttttggactgttcctgcacacttttctgcacaataaccggaatttgattggctatcttcttgttaatagattgttgttcatccattaaccggactatctggaacatctgtcgttccttatcctctaaaagactgcgcacactatcgatgcgctctgctggataggtggccttgaaacggcaaagcatactgtccattgccatacgccgtgcatggtaatgctcgatatctttatcgttccattccagtattgtttcacccaatagagaaaattttatcatttgaatattgatattgtttatttcttttcggagctcgtctatttttttattgccaagttctaatgcttctatctcctgccattcatagaggctattatatgccatacatccgataagaatggagataagtatatatcccaactgtattgccttatagaaatttcctgaccgctccattattttgatgacattgatttttggaacatgaataaaagtttatctttttcgttcatgcggatattatcagaataaccgccttttgttatttgatacccgcatggcttaaccataaaaatgcctaagcccttagtgtatgaacttacttctgatgcatagtctttacttgtatttaatggaactttccctttaatatgacaccactcattattgcaactgatgtcttcaatctcagacatcattttttgcaaatctgtaatagctttggaacttgccgcttggggtatctgcaactcaaaatagagcatcggttcgagaatgtccacacctgactgttgcaaggccagcctgaagacataaggggtcagctgtctgaaatcagcaggtgtacttaccgggctataatactcggcttgagtaaaagttactttcagatcagtcacttcccatccatgtaacccggattggcaagacatacgaatcccttcaaaaacggcattttgaaaagaatggttcagataaccataggagatgtcactttcgatttgcaaccctgtccctaacggtaagggttcaagagtcagccctattgtggcccaataagggttgggcggcacttcgatctgaataatcttattgaccttttttacaggtcgttctttgtatatagtcttgatctcatcaaaatggacctttacggaaaatcgttcttccagcaatgtctgtatgatttccttttgggttaaaccatataacgagatttccaattcatcactatatgagtttatggaaaaggacaaagacgggtcttcaatccacaatgtattcagagcggatatcaccttgcttctctcttcgggcctgtctggccggacggaggatttgagagcgggatgctgatgcgataatccttgaatcaaacaaggttcagcacctaaataatttccgattcgaaaatcatccatatcctctacaatcgcgatatcattggcgcccacttcatcaacatttatctctctgccctgattgatagtttttagatttttaatcttgatgaatttttccgaatcgttgattcttacaacgtctcgaagtctcagacttccgtcaattatttttagaaaacttcttttatgtcctttggggtcatgctctatcttataaagataagatgaaagtctgtttgagaccgatgccggaggaagtataaaagaagtgatggcgtccaacaactcattgataccgatattgaacattgctgatccatgtagcaccggatagactttggcttttgccacaagagcgattatcgtattccaataatcagccggtgaaatttcgctatccgccaaatatcgttctaatatattgtcgtcatggttgcatacaaattctttgtattcttcctttatatatgtttgggagcaaaccggataaaccgatccatcgacaacattttgcataaacaggacatcttgagacagatttgcttttatatccagatacaaacgctccaaattcacaccggctcggtcaatcttattgataaatataattgtcgggatttgcagcttctgtaaagtattgaacagcaactttgtctgcgcttgtatgccttcctttgcggataagatgaggactgctccatcaagcattttgaatgtccgctccacttccgcaataaaatccatgtgtcccggagtgtcaatgatattgcatttcacaccattccagataatagatgtcgtagaagcccgaacagtaattcctctacgtttctctatatccatagagtccgttatggtgtcaccattatccacacagccgcacttttccgttgctccactggcaaacagcagattctcggttacggaagtttttcctgcatcaatgtgagcaagaattcctaaatttataatattcatttggattaagcaataatatactacaatagatgcattgtcgaaacgcaccttttaatacctcctcgtagcatatgagaactacaggattcctaactcgtattaatatgtatattattactgccgcataacgattacaaaattacacaaaaaaatatatctaacaaaagtaggaggattttttaactttttaccatagacattttattagggaaacgtaggttcaactggtaagtacaaataagtagaaatgtttgaacaacactgttttaggaagttgaaaaatcaagtttctctctcggtatagcgtttattttggccaatatcttctttagtttggcatttgagtatttcccattcgtgttctatttagctccttattatgagtatgtagcaagttgcttatcaaattcagcctctttgagggtcaaatatggttttgcaaatggtgactgacaagacataaacaaggtcagcaggattttttacataaatggacatgaatgtatataacctaaaataagaataaattttaataagggctgcccaaaaagaaaaaaatgcagttgccatcctacagatacttgcagaaaggataaaatttacttttagaccttttgggatagcccttattaatacttcagataaaattcctaaggttatattttcaatcctttgaaccgggtttcctccttggcatacagtcccggacgcccgattatgacatggttggcaacgatactatccgccggactgcgtatctgcggcggtgcattttcgggatattgcgcctgcctgttcctcacatcttccgcttccggcttgacctgttgcccttctttctccttttcggcgacttcgggcgtgggcggcgcaagttccagctgtatttttcggtcaagggcggcaagttcggatttcagctgcttcagctcgtcctccttcttccacaccttgcccgctatctcctgcaactgcggtatctccctctccagcacctcgttcttcgccttgtactggtcgataatggagggtatcctctccatcgcgttcaggaagtttcgggcggcagccatcggatcagccattgccagatgtccgttgttataggtgtacttgtagttcccctctaccacgaagcggttgtcggtaaactccaatccctctttgagtatcctctcgctcaccacctttatcggaaaaccgtacagttctccgacctgtgtgtaaagcccgcccgtagtggcgtttttcgctatctcctgcaaacgctttccgataaccttctcatcggcggaatccacaccgtccacctttattatattaaggcggttgccctccctgtcggtctgcgccaccgaaaggaagcggttccagtcctccgtcatggcatctatgaaagccgtgttgttacgcaactcgcccgtcttcgactctaacttgaactccgaatcacgcttgcccttgttaaacgacttgcgttccccttcgagcgaggcgatgcgcttttcaagtttcgccttgtccagcaggtcggtgttgccggatagcaacgccatatattccgaaaagttcatgcccgatttctcgtccactgccccctcgtcgatggtacgcgcccccatagcaccgcttttgagctggctgatgaaagtctgcttgcagtgcaggaggttgaacttgtagctgtccagtgacttctccaccgcgtagatgattacgtccacgttgttcccggcgaaatgcttggcaatttcgtttccggctctaactccgcgtccgtcacgctgttgcaggtcggacggtcgccacggcgtatcgagatgatgaattgccacacaccttttctgtgcgttcacacccgttccgagcatggaggtggagccgaacagaacacgcaccgttccggcattcatggcgtctatcaccgccttccgagccttgtcggtcttgcactcctgaatgaagcgcacctcgcttggcggtatgccgtaatcctccgtcagcttgcgcttgatttccgaatagacgttccacccgtcgcccggctgatatgtccccaagtccgagaaaacgaactgcgtgcctttctgcgcgtcgtatttttggtaatactccgcgatcatcttggcacagtggctcgccttgttatcggggtggtcttcataatgcgggtctatcatgcgcatgtcgagtgccatcttgcgggcgtagtcggtggcgataagcatcttcgccttttcctccgtttccgaaagcggcagcctgcccagaagtgtggcatcgccagtcttggcgaactgcatcagcttctgtatgaagtcctcctgctccggcgtgggcggtatgtggtgcagtatctcattcttgttgggacgatctacgcccacgtcctctgccgtgcggtagtccgtgatttcattatagaaggcggcaagttccggcaccttgatgaagtagcggaaacgctccttttgaaccacgttgttcgtcacgttaaattcaaaatccgtcgtcttcttggcgaatatcgccgcccaagcgtcgaaacatcggatgtcctgccgttccagctccttcggacgcaaatacttgaacagcagatacaactccgtcagcgagttgctgatggtagtacccgaaaggaaggtcgctcccaagtctctgcccgtgcgctcctgtatggtgcgtatggcaaagagcatgttcagtgccttctggcttccctcgctgttgcccagtcccgccacacggtcatggcgcgtgttgaacgtcagatttttgaactggtggctctcatctatgaagatgtggtcgatgcccatctgcttgaaatccaccacgtcgtccgtgcgtgactttatggcatgttccaccttctccagcttcgcttcaaggttgtgtttgcgcttctccagacctttcagcatagcccgcgacacgttctttccctgctgccgcagcacttcgaggttttcctccaccgtgtcaagctccgcttgcaggatgcgctgctgcaactccggcgactgcggtatcttgccgaactggtcgtgcgacatgatgacacaatcgtagtcgttgttctttatattattgaagaagcgcacacggttggcggtcgaaaagtccttctccgaagcgtacagaatacgtgcgttgggatatgccgcctgataggtggcggcaatctccgcaacgttggctttcagcccgataatcatcggcttatgtgccaatttcagacgcttcatctcatgcgcggcgatgcacattatcagcgtcttgccggttcccacctcgtggtcgcaaattccgccgccgttctgtttcagcatccagacgcaatccatctgcgagggatagacgctcttgataccccggcttgccaagcctttcagattgaggtcggggaaggtctggtgcgagccgtcatacttcgggcgcacgaaacagttgaacttgcggttatacattgtcgtcagccgttccttgaactgcggcgactgttcttcgagccattcggagaaaccgttgcggatttcatcaatcttggcgttggcgagctgtatgccctcgctgtcgcgcaccttgatgtcgttgccatgctcgtccttgccgatggacttcatcatgtcggggcaggtgttgtgcagggcgtgtttcaagaggtgcataccgtcatagttccggtaatacccctttaccagaaactcgtccgtgattttcatggtgcggtagccgcacgcaaccgaaaactcgtccatgcttgcggaataggcgattttcacctccgtgtcgaacagccggctcatgtaggcggcatagacacccgtcggaatccagcgttccccgaaattgaagtccagatcctcgaaggcgatacgcggcggttcggcatctttcagagcctccaacgcctgtttcacttccggcatacgctcactttcggggttttcgcccatccaagcctctatgcgttccgccttctctatcacgttcccggctatgaagcggtctttgatttcgtaaccggtcacgagcggattgtaatagatgcgtccttgcagggctgtgagcaactcctccgccgtgctgtcggttatctcccgcatatagtcgagattgaccgtgccatatttgttgagcgacgcggacagggcttcttcgggagagcctacgttggcatggctctccacggagaaggaaacgggatgctcgaagatgtccgccttgacgaactttccgttctccacccgttccagcgaaaggatgtcacgcccgcccgcgtccatcatcactaacttcacgttctgcttggcgttgaggttgccgtagcgcatgacaaactcatcgtaacaggtattcagatgctctcgccacggaacatttgcctcgcgccggagcgattcataacggtacagacgctcgtaggcgtcacgcagcgacacatacaacaacgccttttccttctggtatcctttcaggtcgagcggctggaatgtagccccgtatggcgtgatgtccttcagatagccgatgttatgacgcccccggtcagccaccagcgagccttcgcgcaggtgcatctccggcgtgcgatggtaggcacgcggcgtaaggtccgcgacttcctccttcggcttttccggttcgatgtcgggaaaaagggaagtagccaccgtttccggtggagcatcggtaacagcaggtgcggcgactgcttccggctgtgtttcctcctgccggggttgttcacgtggtacttccggcgtgatcgtcgcaaccgttctgttttcatgtttttcattatgctgccttgccagctcccgaagttccttcctgcgctccggcgtgagttccatcatcatctcgtagaagccgttgatgggaggattggtttcccagtccagctttgcatagatgtcgtccgggtcggcaggcttggcggtgttctccgctttcacctccttattctccatagcgggttttgcagttggagctgtcggtgtaaccgtgactttcggtttgggcggagtggactttgccgtaactgcctttttcaccgtctttttctttttggaggttttcggttggctgacctcttccgtcatcccccagaggtcgagcaaggagagctgcaccccgtcagaatatttcggacgtggctctatctccggtttttcctcaacgggttgcggtttttccgtcggagtttccaccgtctgcgccgaagataccgtttccaattttatagcaggacgctccgcctccttttgaacggtaaccttttcttccgttcccgactgccagattgttcccgaatacagacgcatggcgagcctgtaatggaaatcctcgttgagcatccggcgcaagtccccggcgatacctgcggtcttgccctcgtgcagataaaccatagcgggcttcccgtaggggtcagtgtcaagtttcgacgtcgtatgcacgatgcgttccgggtggtggatgaaataggcgttgtcggtcaggtcggttttcgtgtccgtctgtatcacggtcatcagccgctcgtcctgcgacatttccttcttgctgaggttcttttgcaggacaatcaggtcgctgcccacctccgtccccgcgttgtccgtgaacaggttgttgggcaggcgtatcgcggataccagattggcctgactgaacagctcgttacgcacggaggtcttggtgctattcaataccccttgcgaggtgatgaacgccacgataccgccgtcacgcacggcatccagtcctttgagaaagaaatagttgtggatggttttctgggcggagcgtctgccgaaagagtcgctccgctgaaactccgcgtcgaacacggcaatgtcaccgaacggaatgttggacaccgccaagtcgaaataattgttgaacggtctttcgattttctcaaaaccgcaggtgcgcattttctggtcgggatagagatgcctcaagattgtacccgtgagcagatccttctcgaaagccatcacatccgcattggggctgtgccgtagcatggaatccacgaacacgccgacacctgccgacggttcgagcatacgggcggggcggacgctgtaatctgccagcacgtccgcgatggtgtcggttatctctttgggggtgtagaaagcggtcagcacggacgctttcagcgaatccacaaaccgcttgtactctgtttcgtccttgctgttctcacggataagcctgtgcagctccaccgtcggggcgaacagttcgaggtcggatttcgcccaccggacggcatccgtcagttcctttgcagggttgaggatacatttcagaccgccgaaaccgcagtacctttgaagtatggcacgctcttcggttgtcgctgtcctgttttccctgtcaaggatgaatgccgtccgtatcgcctcgatgttgtcccgcagtttctgtttgcggttaaacgccatattcgtctaagtaaaggacggttgctcccgtcagctccgtgtagagcaggtcgtaatcggaagacagggcgaaattgtcatccgagaggtcatagacggagaacacgttgccgacaagcggcagcagtttcaggacaaaggcttcacgcttctcttccggcacttcatcggcaaactcgttttccacgacttcgcggaggatggcgtaacgggaataatgcagcccgcgcagcagcgtgtccatcgccagttcctgcgcaccatcggcgggatagccttcaagccgtgccctctcatacgtttcggcggcacggtcggcccgttcccgtatgaaagcggtgtcgtcagcctgttcaaacttgttcgtgcggagatagtccagcaggtacagaccgtaataggaaaagtcggtctgaccctcgtttttcttcttgttgttcattactttggatttagcggattgataattaacgggataatcggttggaaaaaggaagaaaaaggcactcggtatccctccgagtgccaccactaaatccaaagtatgagtgtaatccggtatcgaagaacaattcattactctgaacaagtggcaaagttaatactatttcttccgtcctgaaaatttcttgccctttttagcctccgggaacacaaaagtcgtgttatattccccgtcaaaggcaacaacagcatcgaaactcttgccctgtttgctcttgaaccctttgagcagcttggtatgcccttcggtgagcaggtctttgatttcatcgtcggacagggtgcgtcccgctttcagccggaacacgggcagtccgcactccgtgttgtcgcagcgtaccaccttgccgtagaaccgcatcctgcccgtgccacacttgggacacgcgcagccggagtcacggctgccgaagagcttgtcgcacgagagcagttcggaggttatctcacgtgtgtacgcctctatctccttgcggaaggtgtcggcggacagttccccgcgctcgatacgcgccagctccttttcccattcgcccgtcatggcaacatcggcgatgcgcatcgtcttgacgacggaattgagggcaagtcctttttcggtgggaacaagcgacttcttgcagcgttccatgtaaccgcgcttgaaaagcgtttcgatgatggaggcgcgtgtggcgggagtaccgatgccacagtccttcatcgcctgccgcagtgcgtcgtcctcaatttccttgcccgccgtttccattgccgagagcagggtggcttcggtatgcagcggcttgggtttggtctttccttcggtaatggacgagcctttcggtgtcagcgtgtcgccttcctgccagccggggatggtaatttcctctttttcctcgccatagacggcacgccatccggtttgcttcacgacgctgccttttacggtaaactccactccggcacattccgccgtgacagtggtcacatccttgacgcatttctcagagaatgcctcgaccatgcgcccggcaatcatctgatagatggtattgtcctctttggagaggaagagcggtttctcacccgtgacgagcagggcatggtggtctgtcaccttgccgtcgtccacgctgcggcgtgtcggggcggcttttgcccgcaccttgtctttccattcgggctgtgtgccgatgaaagcgagcagtttgggaatttcggcaaacacgtcttcggggatgtagcggcttcccgttctcggataggttatcaacttcttttcgtagagtttctgcgcgatttcaagcgtctgttccgccgtgaagccgtgcttggcgttggcttctttctggagcgtggtcaggtcgtagagcaagggagtttcctccgtcttctccttgcgctcggctttcgtgacagtggcgcaacctgccgcctttaccttattatatagttccatcgccggttctttctctttccatttctcggaggatgagaatttcacgacttcgccgtcgcaaccgtccgttgcgatatggagcagccagaatgcttcggacgtaaagcggcggttctcccagtagcgttcacataccatagccaacgttggtgtctgcacccgccccacggaatacgtgccgtgtccggcggcgatggataacgcctgtgtgccgttgatgcccacgagccagtcggattcgctccgcgctttggcggcgaggtagaggttgtcgtatttgctgccgtcttcgagtttccgcagtccctcacggatagctttgtcggtgagagagctgatccacaggcgcacgaaaggagtggtgcaacccgtatagtggtagaggtagcggaagataagctctccctcgcgtccggcatcggtcgccacgatgatatgttcgcttgtgtcgaacagtcttttgatgacttttatctgcgacaccacgccgctgtcgggcttgtaacctttctccgtcctgacctgacgggggacgagcgtgaatgtgtcgggaataatcgggaggttgtcacggacaaatccgcgcacgccgtagccgtcgggcatggcaagctgaacgaggtgtccgaatgcccatgtcacggcatagccgcctccctcgaaatatccttcctctctctttgtcgcgcccacgatgcgggcgatttcacgtgccacggagggcttttctgcaatgattgtcttcatgttttcttgcttttttgttgatactttggattttattttggattcagtggcggacacgggattacattttcatgcctttgttgttcttctttttcggcttctcctgctgctgttgctggcggtcgtccttcggggcggtctgacctttctgcaaaggctctttcaggttctttgtcgcctcgttggttttgccctcgttgttcaccgccacctgtgtgcggctctcgttggacggggcgacctgctgggcgttgtcggggttcgtttcgtagcggtacgggcggcccttctccgggttgaacttgatatacatcgtggcatggaagccctgcttgtcggtcacgttctccagtttcacggctttacccgccacgtagtcggctttctgcttgtcggtgaagttcacgccgctccatttgctgatggggcggatgctgccgtcctcgttcatccacgtgttgcggcgttgctccttcttggtctgtgcggcattttccccgccttgcgcctgacttttcgaggtgtcacctttggcttcctgcgtctgtgcggtacggggcgaccttccggttcccggcacgaactccacgccgcactgctccacgttcacttgaagggtggtgacgaacttcctgccgtcgttgcgctcgatgagcttgtcgcgcacgggcagtccggcgcggagcatgtcctgctcctgtttggtgatttccgtcttgccgatgcgctccgggatgcgcaccttgtttgccggaatgtccgtgatttcattcgtcttgcggtcgatgctgatgtaggaggggatgatttcgcccgtttccctgtcctcaatgtccacgaccctgccgaggttgcccgtttcgcgcaggttcttccggtcatcgtcggagaatttgtgttccttgtactcatctaacttctgctccttgcggatgaagtgcggcacgaggctgacatttccctcaccgtccttcttgaaggagaggcgggcgtccagctcgaatgattcgccgccgaaggtgggcttgacctttaccaagtcggacttgccgtagtggagcatcttcgtaaggtctccggacttttcaaggtcgtcacgcttcacgccccatctgtcctccagctcctgccagttgattttgctctcgttgatgggttggtagccctgtctgccctgcgtctgttgcgggctttcctgctgttctttctgttgttccatgttttcctgtttttgaggttcttgtttctctgtcttttgtgccgccatctcttcctgcacctgctgttgataagggaaggtgtcgattttgtgcggtgcaaggatttgtttgttctggtacggatgctgaagcaggtctttcatcacgccaagcatggaatccacttggtctgccgcgatgcggtagaaaccgaagcggctgggttccttgcactgccggaagaagttcttgaagaagttgtccagcacgtcgccgtgtcggtcgaattgcaggaaactctgcgcgttctcagctttcgcaggggtacgcttgggtgtgccgtctgcattcagcccggctaccacgctgatctcgcccgtcttctcatcacggactaccagcacgtccttttcgtcttttttctttgccatttgaaaaatgttttaatgggttatttatgaaagaaattatggatacgagccttgtagaaggctatatcttcttttttgaagtccttgatatggttggaaaggaatgtcagcacatcctcctcgctgtaataggttttcttgcccagtgtcttgtagggcaatgcgccgacactgcggtagcgttgcagtgtgcgcttgcttatctggagcagcatgcacaaatcctgattgtcgaaaaggcggatgctttccgtgatagtaggctgtttcccctcagccttcatcgccagcagcagttcgtcctgacggtcgagccgttccatcagcttctgcatccagccctcgaagttgtttcgtgtgagcagttccatgacctatgtcctccttccttttggtttgccgccagtgcgcagcgtgtggttgcgtttcaattcctgcggtgtcgccgcgtcctcgttgacggcacacgcttcaagcaggcggtctatttccgactgccggtagcggcatttaccgcgaagcacgacataaccgatgcgttgctcgctgcgcatacgctggagggtgcgggtactcacgttaagcaggtgcgccgcctcgcgtgtggtgagcaacctgtcgggcgatgccgctttcttgtcgccggaggcggcacggacgtgtgccgcaatctccgctatctgttccgtcaatgaccggaaggcggaactttccatcgttatcactttcatattcagtcctttctttttgtttctgcagcaaaaatcggcaataaacaaaaggggctttaacaactcactacgtgactcacgtaagatttttacggaagatggctccgtaacccggtcaaacggcgcaacaggcagcctttcagcggaaaacggcacgtgttcgggaccgtaccgttacctttgcgggcaaaccgataattgcatgaatatggaaatagtatctatcgagaaaaagactttcgagatgatggtggcggcattcggcgcactctcggagaaggtcgccgccctgaggcgcaaaagcgacacgaggcgcatggaaagatggctcacgggcgaggaagtctgtaggcagttgagaataagttcgcgcacgttgcagacgctgcgcgacaggcggcttatcggctactcgcagataaaccgcaggttttattacaagccggaggaggtgaagcggctgataccgcttatcggcacgctctatccgcacggcagatgatttgatttattcacccactgaatccgaagttatgatgaacgagaacaacgatgtttttacgatggaagacgagccgatagcctctgtggtgcaggatatgcgcaaaggctcgaaatggctgtccgcctttctggaaagttaccgtcctccgctggacggggaacgttacctgacggacggcgaggtggcggaactgctccgcgtaagccgacgcacattgcaggaataccgcaacaaccgcgtgttgcccttcatacttttgggagggaaggtgctttacccggaaacggggctgcgtgaagtgctggaagcaaattaccgcaagccgctggagtgagcgcggttggcaagaaaaaaggaaacgggcaacactttttgtggtgctgcccgtttccttgtcttatgtggtatgcgcaatcagcagtacccggcttttccgttctgtatgaacatcacgtatgcctgccgtttctctttggcgagagcttttcccaccagccatgtgcggaacaggtgggtgttgtaggtgttcagccggaaggcgacggggatgatgatttcaagcgcgtacacatctgcgtacagtccgttttcaagttgcatgtagcggcacacctcgtagtcgttaagcacgtccgacttgcggatggctttgatggcggcgttcactgccgggacggtcgtatggaacagtccggcgatttcggtggcggtcatccacacgtcgttaccggttacgctgaccgccttgtcctctatgatgattatgtcacgtttcatggcttctcttttttagatggtgcaacctgcaaattcctcaacactgttcaaccttgcggcaaggttcttcatgtcctgattgagtttttctttggttatctgtaggctcggcaaacaacgcctttccgctttacagcggtaggttttcgcttacctgcccccgaaccgtacttacacgtctccatgtatacggctctccatctgtaacatcatcttacttgacacatctctggatttttgcgttacactccgcacatacaaccaaagtctttctgtgcatgtagagcattttgcgttcccagtcatttttaccttttaactctttgagtgtgcggacatggtgcattaccacttctccgtgcttgccacatagttcgcacgtttttgttgtaagcctttctattagactcaacgatggcgttttgaacatgtacggcagattgtcacttggggctgtttcacaatccgttttgcgggcatatccctcattatagaataccctgtacttggtttctcctcccttgtttacaaaaggtactgcaaagagattgtccttgcggtatctttcaatgacttttctcactgacatattcagcttttgagcaagagttttgtacatggagaacttcataatacagccgaaagagcgtcccaaagccgatgcattgtttgctattgagtaatagttgtagaaccctcgtatttcggtattaaactgagatacaatctcgtgcgcttcattgtcaatcatataagtcctgccttttgacacccatgtctccttgccgtgtttggtgacaactttcatggcttcgaggctgagcagcttgttcttgattacttctcttgaaacgtgtagtatcacattcccgttgaagtatctgcgcactgttccgttactgtttctctttgtggcatagtctttacggacatatatttcgtaacccaaaaattttgcgctgtcttgtgcatttgtaatcaaagtcttttcctgtgacatctccagccttaacttttcctgcataaacttagtgatgtcagctttgattgtctcacattcgtttttcgttccgataactccgataaggaaatcatcggcatagcgcacatatttcaacctgcgaaagtttacatccatatcattgccacttggcattgtaagtatcagcttctgcttttcgtgcagttcttctaccatccttgttcttacgtttacatcctctacttcatttatcctacgttttaggtagtgtactctgctgttgagtttgcaaatatccttgttgcggcttcttgctgtccctttattgaatttgttggcatattcatccatgtacttatcgaacttatctaagtatatgtttgccaaaatagggcttatgataccaccttgcggtgtccctgaataagtcttgttgaattgccactcttccatgtaccctgcattgaggaatttccgtatcagacgaagaaatctgtcgtctgctattctgtctttcattatttctatcagcacattatggtctatgttgtcaaagaagccttttatatctccctcaatgaaccattttgcaccgttgaaattgttttgtagacttttcagtgctgtgtggcagcttcggtttggtctgaaaccatgcgatgtccactcaaagtgtccctcatatatggcttcaagcaccattcttactacctcttgaaccaatttgtcttcaaaagacggtattcctagcggacgcatcttcccattctttttcggaatgtaagttctctttgcaggattgggactataagtctcatcctttatactctctatgagtttgtttatcctatcaatgctcatttcatcctcagttttgccatctgtgccgggtgtcatgttgcccggctttgcatacatacgttggtaggcgacaaagaacatctgttcattgaatagaatacggtaaagcctttcgtatttatactcgggctcattgctgtgtccagctaaaatgtttaatacttgctctggatttctcatacgtctctcacgttttccgttgtttgtattaaagttacagactacttcccttcgccatgtacaaggctttcccttgctcagactactacggaagttccgttaccatatcggatattcaaaagctttctttatagctgtttgttccagcgttccgacttaggtaatccccagttagttctcttaataactattagcacgacatactgtcggatgtgactttcgttcttgtccgcttattgcggctgtgtcatagtcggttctttatgctctgcactaacgcacaaaataggcagagtactatgaaacaacgtatgtataatagtcttccgttgttgcaagatttggtaccactgaactatcattcaaccaatcaaggcttcatccttatgtatgtcttttcgtcttgcccctcagtcgccacctgactattagtggacttggagctttaatcagtatgctacactctccatcgggtttcccttttggataaactgattgacgataggactatatcgaacccaatcctaacttcttgctaaagaagtatttattaagcgaccattctgggcgcactcgcgtaaatctgcgtcgtctttatgctcttgtgtccgagcatggagctgacggtttcgataggtacgccattagagagaaataccgtcgtggctgccgtgtggcggctctgatgccacgtgatatgcttggtgatgccgcaacgcttggcgacggcacggataccggcaaggcacgtgttataatgcgggacggggaatatcttgccgttctcgcacagcccacggtatttgccgattatgcggttggcgatgtcaagcaggcggatgttggacaccacgcccgttttctggcggttgatgtttatccactcgtgttcgtcgaagtaggtgcggatattctcttccgtgaggttgcgcatatccgagaacgacaacccggtgaaagcgcagaacaggtagaggtcacggtacagttcctgtttggcgtttttcagtttcccgtccatcagcaggcgtatttcctctttggtcagaaaactgcgtgttgtttcctccttcttgatttcatactcgcggaacgggtcgcgtgtcagccactcgttgttgatggcgatgaacaccatcgtccgtagcgggcagacgtacagccacacggtattggtgcagcagtgtttgtccgtgcgcaggaacatctcgaagtcggagatgaaagcgggggtaagctctttcagtgcgatgtccttcacatggtagcggatgtcgaggaactcttgcaggtgcttgtaaacgatacggtacttttccagtgtaccttttgctttcatgcctgcttccacctgtttctcatagtcctcattgtgacgacggtacacctgcatcagcgtgtggtagcggtgttccagtccgagaaaagcgttcttcaccttctcagccgtgacgaagttgtcacgttccatgatttcctgatagtgcctattgatgcgcacccgcatcttgtcaagcatacggttcgtttcgagtgccgccgcgcttctgcctgtgacacgtccacctttggtgtcccacagtttcggatcgactgtcagcttgcagctgaactgcgtctggctgccgtccaccgtgatgcgtcccatgacgggtactgtcccgtcctttttcactacctgacgcttgaggtaatagattactgaaaatgtactcttcatcgtccttaattttttggtttcaaaattagttggtgaagagtccggtgtcggtacgcaaaacggggaggaacggagcaatctttttccgtaaccgaaatttttgcgtgagttatcggtaactcactattccttaacgtattgtttcgctatccgtacccgtttgtcgcattttcgggcatggttacgaacaagtaacgttgcggcgtcaggatttggcttcggcagggattgtaatggcttcacgaattatcgccacttcaactaaaacccttgtaactcaattctatcactataactttccgcatttcacttttttgtagtaactttgtagcgcaaaaaaaataaagttatgagaaaggctatattggtgattatgttgttggtaaatgtgtctgcatttgctatagaaaagaagacgaaactggtagtggggattactgtcagtaatttctatccggaatggttgatgatatataaaaatgatttgtcggagaggggcttaaaaagacttgtgttgcaaggcaaacgttacatagcagattataattatatgtattcgcaaacaggaatggatcactcaacgatttattccggtatgttgcctgctgagcatggaattgttgcacatgaatggtatgaccgtttacgtaataagcggcaaaataatgtacaagatcctgattatatgttgataggtgatgcagggcagggtgcaagtcctcgtaaattgggtgctttgaccttgggaagtgtcatgaaaatgaatagttcgttttctaaggtttttagtgttgcggctaatggcgaagaagcagtgttgagtggaggcagtgctgctgatatggctttatggtttagtacatataatggtaagtggatttcttcaagttattatgcagattcattgcctcattggttgagtgtttataataagaaaatggagagtgatttttttattcgtaaaggttggatgtctttggctgatgaaaatgctaataatacagcgttgaagttgaagagcaaagtagggcttgcaaataattttttttatgatttaatgcaggcaaagagaaagtataatacgtatcagatattgaaagctactccctacatgaatacattgattgtagatcttgcaacagaacttgtaaagagtgaaaatcttggtagagataatgatgcggatctgttagctttaaatttttcttgtcttgactatatgaatcgtgattatgatatttattcccgtgaatttcaggatgtagtgatgcgtttagataaagatatcgaacgtttgcttgatgatttggatgctaaagtcggtggagataattatactgtttttcttacgttttcagaagctagggaattattgccacgtgatttgcaaaaaatgcgtttgacctctgaatattttagtatttttaaagctgtagccttgatgaagtcttttttaagttcaatgtatggaccgggcgattggatattggattatgatacttcgcaaatttatttggatcgtgcattaattgaaaaaaataagatttcgttgaaagatatgcaggataaaattgcagattttcttgtggaatttgaaggtgtttctcatgtaatgacgtctcatgctttgactcataatgcagcaacagccggttccggtgtgttgtttcagaatgctttttctcagaagcgaagcggtgacattctttattctttgcaaccaacatgggttgctgatttaaaggatcgtgaagattattatgcgcattatagtaaacgtcatcgggttcctttgtatctctatggagcaggagttcctgcaggaattcccgaaaaatgtcaaatgacagaactgttgtctatcatgtgtcagatattgaaaatacctgttccttatactgcagatcgatgattattgttcagaagaaattcgttcgtatcttagttttttgatgcggcgattatccacttctaagactgtaaacttatgttcttgataagtgattacatcattcttttgaggaagttctcctttgatttcgagtattaatccagccaaagtatcagcctctccctcaatgtctttgaagctgtccgggtcggcatcaacgatttttagaaaatcgttcaggagagtacaagcttcaaaaatataagtgtcgtttttcaagagaatatatgtttcttctttttcgtcatattcgtcattgatttctccgacaatttcttccaatatatcttccattgtgacaatgcctgaggtgccgccatattcatcaacaacaatggccatgtgtacttttttcaattggaattcttccaataaatcattgatttttttagtttcaggaacaaagtaagccgggcgaattagtgattgccatttgaaatcggcagattcattcagatgtgccaataggtctttgacatagagaataccttcgatattatctaaattttcacgataaacaggttgtcgggaatagccatgcttgatgacagtttctttgacgatattaaaatcatcttcaatgtctagggctatgatgttgatgcgaggttggatgatgtcaattgcattgatattgctgaaacgtacaataccctctagaatatctttctcattatcaatttctgcatcttctgttaactcaagggcttttgacaattggtcaatggatagaccgtcttttttagctatgcgtttgctgataacagaggttgactttattaataatagggataacgggcggaaaatgtagcttgcgaaagtaagtggccctgccataagaatggcaactttcgtttgggaacgattagcgtatagtttaggaataatttctcctaccagaaggattataaaggtgactacaattacttgtatgacaaagcctaatatcggataggcggagaaatcgaagaaggtgtttactaaataactggaaataataacgataccaacatttacgaaattgttcgtaataagaatagttgataacaataaatcgggttttttcaatagaccgagtattttgtgatatcctttctcttttaatttatctaattctcctggcgtaagggaaaaataagcgacctcagatgctgatgctgatgctgaaaatagcagcaaaagtaaaagaacaatgatgagtataatgtctataatgtcgaaagttccgcggaatatactttgcaccgcgccataagcatctgtttccaaaatttagaaaattagttaaacatatagaacttcagtacaatacatattaaaagctacagactgaaagttgtaggcaaatataatacaaaatctctatattctaaactatttgcctactttacttttgtctgtagcttttcggaattattccgtgcttttgtttttattaaaatgggagatcatcattatcgtcagctggcatttcaggagctgtttgagtgaatgtggaaggtgatgatgtcgagcgagaggaggccatattgttatcgtcagctcgagaaagcatttgcatattgtctgcaaaaatttctgtggtgtatcgttttataccattctgatcatcccatgaacgggttcgcaaacgtccttcaatataaagacgcataccttttttgacatatttttctacgatttcagctaagcctctccataatacaacgttatgccattctgtctgctcgatgttttctccgtttttgtttttatatctttctgtggttgccaaacgaatattagcaacagcaacacctccgtcgagatatctaacatcggggtcagcacccacatttccaattaagattactttatttaccataatgtgtatttttatagtattaaacagtcaatttatatcgtattttattgagagcgaagttaagtaaaaattctagaaacggaaaaaaaagacaaaattcacttcaattttttcatacttaatggaaaagccttatatttgcagactgaaaacgaggtatgaagtaatatattattgaaaattaaatatttaagtaaaaatgacaaaagcggatattgttaacgaaatttcgagaacgaccgggattgagaaagtagccgttcaagctactgttgaggcttttatggaatcaattaaaaactccgtgattgaaggaaaaaatgtttacttgagaggatttggtagctttgttgttaagcagagagctgaaaagactgctcgtaacatttctaaaaatgttacgattaaaattcctgctcacaacattccatcattcaaaccttctaagagttttgttaacgaagttaaggacaaagtaaaaaaataagaaaggaggaatttatgccaagcggaaaaaaaagaaaaagacataagatggcgacacacaaacggaaaaaaagactgagaaagaatcgtcataagaagaagtaacacttcgcgtttgtgagaaagatataaacctaaaggcatttgtctttaggtttatttgattaaagacaataggacttattttgattattttaatcaataggaatagtgagcagtgaattagttatagatgtaaaagcagacgagattgtcattgctttgctccgtgagaaaaaattggtggagctcaccaaggagaaaacaagcatgcaatttgccgttggtgatatttatctgggtaaagtgaagaaaattatgcccggattgaatgctgcttttgtgaatgtggggtatgaaaaggatgcttttttacattacctggatttaagtccgcaatttcattctttggatagctatattaagcagtgtattgcccgtaagggaatgcctgtgtctaagctgaagcttgaacctgaaatagctaagaatggaaaaatttctgatatactgacagtggggcaatgggtggcagtgcaagttgcaaaagaacctatttctaccaaaggtccacgattgacttcggagttgagcattgctggtagaaatcttgtattgatgccttttgctgataaagtgtcagtatctcaaaaaattaaatcgcaagaagaacggaagcgattgaaacgtttgatagaaagtatcaaaccgaagaattacggggtgattgtgcgcacggttgctgaaggaaaaaaagttgcagtttttgatgctgagttgaaagaattagtggagcgctttgaaactgcctttaagcatatccgtgaaatggaaccgcctaaacttattttaggtgaaatagataggactagtgctattttaagggatattcttaatccctcttttgagaatgtctatgtgaatgatatcactttaagtaaagaaattagacatttcctcagtacaatcgctcctgaaaaacaggatattgtaaaatatgtatctcccgaaatccccattttggatcatttcggtgtagacaagcagataaaatcttctttaggtaagactgtttcttttaagaatggagcttacttaattattgaacatacagaagcttttcatgttatcgatgtgaatagcggtaatcgtacaaagttgggcgatgatcaagaaaccaatgctttggaagtgaatcttgctgcggcagaagaggtcgcgcgacaattgcagcttagggatatgggcgggattattgttatcgactttattgacatgttaaaggcagaacatcgtcagcagctttttgacaaaatgcgtgaatgtatggaaatagaccgagccaagcatacgattttgccattgagtaagttcggactgatgcagattacccggcagcgtgtgcgtcccgcaatgactgtcgatacaatggaggaatgtcccgtgtgtcatggaacaggtaaggcagaggcagctattttggtgatagataagattgaagatatgcttgaatactatgccagcgagaagaaaaacaagaatatcgtattgaaagtgcacccatttgttggagcttatctaaaaaaaggattttggtctttacgcaggaagtgggcttttagataccgtatctctttgagagtgatagatgtcccttcttattatatttatgaataccatttttataataaatataatagggaattagaagattaaaagaagggggtgagcgtatatttagagactaaaagtggatgtgtagtggtgaaaagcttttagtctcttttttataagagtgcttcttaaagaaacttgaaaaagactgtcagccccattaattatatgttaaacttgcatttagatttattgtaaaaaaaaattaataatatttttgtgtagaatttttgcactcaatgtgctcaagaatgaagataaaagatcactttattaataattcacgaggtaaatttatgaaaaaaggattgtttgcttttgtattaacgttcatcgtaggaatttttactgtgtctgcacaggtagaaaatcctgcaaaatggtcgttttcccagaaaagcctgggaaacaatgaatatgaattagtattcaaagctactattgagccgagttggcatgtttattcaatgtacactccggaaggagggcctatggctacaactctatcgattgaaaatgctggaaaaggtattgaattgataggtaaagctacagagaatgaaccggtcaaagctcaggatgctgtattcggtgttgaggtatggtcgtttgaaaatgagtatgtacttactcaaaaagtgaaaattactgatgcttctatcactgctgtaaagggaactttagagtatcaagcatgtcgtgaaggacaatgtgtaatgtttgatgaagagttcagtatcaaaattaacgatgctaaagtaaaagtagaggctgcttctgttgataagaaagaggcagaaaaagatgaatctttgtggctgtttttctggggtgcatttgtagccggtttggctgctgtggtaatgccttgtgtattcccgatgattcctatgacggtttctttctttatgcatggagattctaataaggctaaggctaaagctaaagctattttcttctctttatctattattgcgatctatacagcattaggattgattatttctatgttgctgggtcctgattttattaactggttgagtacaaactgggttccgaatgtattcttctttgttatctttatgatttttgctgcatctttctttggtgcttttgaaatcgtattgccgtcatggattgtaaataagtcagatgctcaagctgataaaggtggttatgtcggtgcattttttatggccttcacattagtgttggtttctttctcatgtacagctcctattgtaggaactgttttggttgaggctgcacgtggttctgttttgcgtcctatcattggtatgttaggtttctctgtagcggttgctcttccatttggattttttgcattcttcccgtcaaaattgagcaatctgcctaaatctggtggttggttgaattctgtgaaggttgtcttaggtttcatagaggtggctcttggttttaaattcttgatggttgcagaccaaacttaccactggggaatcttagaccgtgaggtatatattgcaatttgggtggctgtatttacattgcagggactttatttgatgggcaagttgaaatttgcacatgatagcgaattgccttatattggagtgcctcgattaatgtttattattgcaacatttacttttgtaatatatttgattcctggtatgttcggtgctccgttgaaagctttggctggttatttcccaccgcaggagactatcgattttgacgtgagacgtattgttcgtgaggaaatgaaaaacattactgtaagtgcaggtgctacagctgcttctgctaaacctgcagaatgtgaagctcctaaatatgcagatttcttgcatttagctcatggcttggaaggatatttcgattatgaacaagctttaaaatgtgctcaggctcaagataagcctttgtttatcgattttacaggtcatggttgtgtaaattgccgtgaaatggagcagactgtatgggctgatcctcgcgtaatgaaaatgttgaaagaagagtatgtaatttgtgctctttatgtagacgataaaacaaaattgccggaagaagaatggtatgtatctgaatatgacggcaaaaagaaaaaaactttggctaagaaaaatgcagattttcagattaagaaatttgcatctaatgctcagcctaactacattctgttagatagccgtggaggtcacgatgatgatttacagcagcatgtattagctcctgctcgtggccataacttggacaaggatgcttttgtagaattcttgaaacggggcttggaggaatataaaaagagaggacagaaaaaataacttctgcgatattttttaagagtcggttggcgatttatcgtcaaccgattttttttgttttaggaaatgctgttagttattagtgtttttattaaatttgcaactttatgtaattgacttaattatttttatatggagtggattaacggtttgttgttcggatctggaattggacattcaattctgttgattgctgttgttgtttttataggtattctactaggtaaggtaaaagtagcagggatatcattggggatgacctggattctttttgtggggattattctgagtcattttgggatgcggatggatgcgcaagctttgcatttcttaaaagagtttggtctaatattgtttgtgttttctgttggcttgcaagttggacctggatttttttcttcttttaagaaagggggaatgacgttgaatcttttggcaacaatggttgtggtattaggcgttataacaacctatgttgtctataagattacaaatttggatgcaacaattatggttggtatactgtcgggagctgtgacaaatactcccggattaggagctgctcaacaagcctattttgatatgaccggtaatgaagggtcgcagattgcaatgggatatgctgtcgcttatcctttaggtgttgttggtattatcttagccattattcttatacgttatatttttagaatccgtttggataaggaagctgaggaggttgaaagtaaagccggtgaaaaggcatcacatgcaactcatgtttcaattttagtgaagaatccaggattatttggtaaagaaattcgagaagttgcagggttgatgaacaagaagtttgttatttctagagtcttaaataaaaatggagacttggaagttgccacttctaatacacgtttgcaggaagatgaccgtttgtttgttattgttgcaaagcaggatgtggaagcgattgtagcttttcttggtatgcaaattgaaatgaatcagtctgattgggatcagattgatgagaatatggtgtcgagacgcattttaattacgcgttcggagattaatggcaagacattgggacaattgcatttgagaggtggatttggtgttaatgtgacaagagtgaatcgtgctggtgtggatttggttgctagtccagctttagagttgcagatgggagaccgagttacggttgtgggaccggaaaagaatattgcaaatgttgaaaaacgtttaggtaattcgttgcgtcgcttgcgcgagccgaatcttgtgcctattttcttaggaatagctttaggtattgtgcttggaagtattccttttgtttttcctggtataccgcagcctgttaagttggggttggctggagggccattgattattgccatattgataagtagatttggtccacattttaagttggttacttatacaacaatgagtgctaatttaatgttgcgtgaaataggtatctctttatttttggcttgtgtaggtttggatgcaggtactgggtttgtggatacggttgtgaatggagggtatgcttggataggttatggatttatcattacttttgttccgctgatgattgttggtctaattgcaagattggtttataaagttaattattttacattgatgggattgattgcaggtagtactacagatccgcctgctttggcatatgccaatagtgttgctggaaatgatatgccagccgtcggttatgctactgtgtatcctttgactatgtttttgcgagttttgacagcacaaatgttgatactgatgttattataagaatattttgattaaataatatggttatggctttcggtatagcagatctaagtattattccaatgaggagggagcaatcggaaagaagtgaaatggtgtctcaagttcttttcggagagttgtatgaaattttggaagaggctgagaaatgggtttatgtacgtttattgcatgatggatatgaaggttggattgatagaaaaatgtgtgtacctatcagtgaagaatattttcgagcttaccaaagtagagaacatttgttagcgacggaggttttcaatattgtagtgaaagacggggattgggggaataaattgattgttgcaggtagtgttttgccattctttgatgtcgaaacaaataagatgcaggttggtgatgctgtatataccttagtgagtaaaacgcaagggaaaggggagcagaatttgcgagatttattggtgagttatgcattgatgtattataatgcaccctatctttggggggggcgttctccatacgggattgattgttcgggattagctcagatcgtgtatcgtttgattggaatcagtctgccaagagatgcttcacaacaagtggtttgtggacaggacctttcgtttatagaggaggcattaccgggagatttagctttttttggtgatgaagttggtaatatcactcatgtcgggattatttggaagcagaaaagaattattcatgcatcaggaagagtgagggtggacagaatagatcaccaaggtatttataacgatgagttgaagaggtatacgcacaatctcaaggtgatcaggcgtatactttaatccataatttataatttttctttagcatcagggccacagcaaaaaattaaatcaaggatgcttaaatttgctgtaaatggaaatctgtcgctaaatgtctgtctatatggatgtgatggaaattctattcctggactacgatgtgaggctttggggtggatggcagttcttaaatcagtatagttttgacaaccttctgggatatagtctgctgtgtatgaaatgtctttttttagcttcagcaaatctgaaacggtagctagtataacattgtttaaatcaaaaagaaatgtttcttttttttcaaaaaatgggattatatcatcaatataatattcatagtaaggcgaatttttgtaagcggattcaatgcttttaaaatggagtttttgccaattagttgtatatacgattttcaggtcttttactagtgtcttgctattggcttttgctacaggtactgaaagagggatgattccatttgcagtcataatttcacaacgattccggtaactttgtttcccaaaattttcatattgctcaatgaagatatgttcggcttcgtttatggctgaaaaataggaaataggggggaaatatgctgttgtcaataatagattatctatattcatctgtgtcagtttaattgatgctttatttctttgatttttaattgtgcgaagatagtgaaataagtggaatgtggaaatagcaataattaactacattttgtaatcaacttgtagcaaaatggtgcagattttgtaatggctatataatagttatgtaatatacaaattttggtagttaaaatatagataaaaatttgtggattgattttttgtttcatatctttcggaaacagtgctagactaaacgttctttgtgattcaagagagaaagagagacatttcttctagagtatggatgtatttttagcaggaaatgagaactttaatttgtagaattacgtaaaacgtttgggtgtccgttagaatatggcggaacaataaacttcttgatgagaagatttattgtggtagggatgtaaatatcagttaaaatattaggtaaaatgagatttgatgtaaccttgcctgatcctttattagagcctttccttcctgttattcacagaaggcatgagaagagcatattgcgagaattggaatatactaaccgcaagtatcgtttatcggatgttttcaataatcatttgtattttggtttgcatgaacaggaagatggaaattgggtctttcgagaatgggctcctaatgcaacggctatttatataatcggtgaatctaatgaatgggtgaagcgtgaagagtttcgattgaaggatataggtggcggtgtgtgggaagtgttgttgccaagggaggaaatgtggcatggaatgaagtataaattatgggtggaatggcagggtggctgcggagagagaataccgacgtatgtacgcagagtggttcaggatgatatttctaaagttttttctgctgaagtctggcagccgaacaagcaatatcattggaaatatgcacaacctgatagagttgaccatccattgatttatgaggctcatatagggatgagtatggaaaatcggagggttgcaacatttaatgaattccgcgcttatatattgcctcgaattgttgatttagggtataatacgttacagttgatgggaattcaagagcatccgtattatgggtcgtttggatatcaggtatctaatttttatgctgtcagttctcggtttggaactcctgatgatttgaaacgcttgattgatgaagctcatggttttggtgttgctgttgtgatggatttggttcattcgcatgctgtgaagaatgaagtggaagggttgagctgttttgctggcgattatggtcagtatttttattcaggagagcgaggtgagcataaattgtggaattctcgttgttttgattatggaaaaaacgaagtggtttcttttcttttatctaattgtaaatattggctggaagagtttcatttggatggttttcgatttgacggaataacgagtatgttatattgggatcatggtttgggacgagattttacagaatataaattctattatgatggaaatcaagatgaagatgcgattacttatttgacattagccaataaactatgtcatgaagtgaatcctaatatgatatctatcgcagaggatatgagtggtatgccaggattggcgatgccatttgaaagcggtggaattggttttgattttagaatgagtatgggtgttccggattattggataaaattggtaaaagaaaaaggtgatgaagattggcatgttggagatttattttatgaattgacaaataaacgaccagaagagcatactataagttatgttgaaagccatgaccaagctttggtaggggataaaacattttttttccgtcttgtagacaaagagatttatacgggaatgagtgtgtttgatacaaatatcgtaatagatcgtggcatggctttgcataaaatggctcgtctattgacattgtcaacagctggtgatggatatttgaattttatgggcaatgagttcggacatcccgaatggatagattttccacgggagggaaataattggagttacgatcatgcgcgtagacaatggagtttggttgatgatagaaatttgaaatttcattttttgaatgaatttgataaagaaatgattgctttggccaagatgaaatattttttttctgatacaccagaacctgtagttagagataatgaacaacaagtgttggtttttagaagaggtgattatctgtttgtatttaattttaatccaacccaatcgtttacagattatatgtttgaggcacatgttggcaagtatattattagcttagatacagactctaaacattttggaggttttggtaggcaagacgataatttggagcattttacactttccagagatgggaaaaattggttgagtttatacctcccggcaagatcaggaattgtattaaaatatgaagattgaaaagattaatgatataaatgtatggcttatttaaagtttaataaggatgaattggtgaatttggagtattcactgaaacgtgaggtgttggcaacaaatcgtgcagggggatatatgtcttcaacgattattggttgtaatactcgtaagtaccatggattattgattgttcctattgaagaatttggaggggtgaatcatgtgttgttgtcttctttggatgagactattatccagcatggtcaagaatttaatttgagtattcataaatatccgggtaattatgagccgcgtggacataaatatattgttgattttgagtatgagccagtctttactttgatttatcgtgtgggaggagtgaaattgaagaaggagatggtgttagttcataatgaaggccaagtgcttattcggtatacattgttggatgctcattctgatacaatattgcgtttaaagccatttttggcctatcggaatattcatgctttgtcaaaagcaaatatgatggcaaacacgaaatatcagccactggagaatggaattcgttctaagttatataatggttttccatcgctgaatatgcaaataaataagaaaaatgaatttatagcagtccctgattggtattataatatagagtatacagaagagcaaaatagaggatacgagtatcaagaagatttatttgttccagggtattttgaatttccaattaaaaaaggggaaagtgtaattttttcagcttcaatagaggaggcttctcctagtcgattaaaaactaagtttcagaaattggttgatgagcgtgcgcctagaaatagttttgagaattgtttaaaatattctgcatctcagtttattgtgcgtagaggtaaggatacggaaattgttgctggctatccttggtttggaagatgggggcgtgatacatttattgctttgccggggttaacattatctgcatcgggtgatataaagacgtgtaaggaagtattggatacgatgataagacagattaataacggattgttccctaatataggtaaagataaagatgcggcttataattctgtggatgctccaatgtggttttttaaggctgtgcaagaatatggtgatgtcttaaaagatgatgcatctgtatggaagaattatggggctaaaatgaagagtgttttgaaagcatttcgcgacggtgtgaatgactatattaagatggctgaaaacaatctgatatgggcagatgaacctggcaaagcgttaacttggatggatgctgttgtgaatggtgttcctgtaactccgcgtggaggttatcaagtggaaataaatgcgttgtggtataatgcaatctgttatactttaaagcttgctgataaagctggagacgagaaatttattagagaatggcaggatatgccttctcgtgtaaaagatagttttataaaggtgttttggaatgagaacgtgaattatttagctgattatgtaaatgaagaaggtcagaatttatatgttcgaccgaatcagattattgcttgttctttggaatacagtcctttgagtgatgagatgaaacgtgatgtattggatgtcattaagggaatgttattgacacctcgtggtttacgtacattgtcacctagaaatagtctttataaaggtcaatatgaagggaatcagatggaacgagatcaggcttatcatcaggggactgtttgggcttggttaataggaccttatattgaagcaaacttccgtctttatggaaaatcttttgcgaaagaagcaaaaaatcttttagctggttttgaagatgatatgacagtttatggtatatgttctgtgaatgaaatatatgatggtaatcctccatatacacctaatggatgtatttcacaagcttggagtgttggtgagatactgagaagtatggcaatgattaagaaatatataaaaaaatagtcaatgaagacaagagttttaatgttcggctgggagtttccacctcatattgcaggaggtttgggaacagcttgtttaggattgacgagagggcttgccaaacaaggagtagaggtattgtttgttatgccgaaagcaagcggcgatgaagaccaaagttctgttagaattattaatgcaagcgatgtagagtctttgtatgaataccatgaagtggaagaatattggaaaaatatcaattttatggagataggttctaatttaattccttacatggatccagaacgttttgagcgagaggttgcagaaagtattcgtgaacaggggagggaaatacgtattggatttaaaaataagtttcagttttcaggtaagtatggtgcaaatctaatggaagaggtagggcgatatgcactagttgctgcaacgatagccagtcaacaacaatttgatgtgattcatgcgcatgattggttgacttatgctgctggtattgcagcaaagagggtttccggtaagccattggtggtgcacgtacatgcgactgaatatgatcgtagtggcgagaatgtaaatcagcttgtgtataatttagaacagcaaggtatgttggaagcagaccgagttgttactgttagtaatttgacacgggatattgtaatcaatcgttataagattaatcctgataaggtggtaactgtacataatgcggtagattttcagtcttattcagatatgaaagtagaacgtggtgtacaagaaaaagtagtgacatttttgggacgaataacttatcagaaaggaccggaatattttatagaagcagcaaataaggtgcttaaacgttatcctaatgtccgttttgtaatggcaggcagtggtgatttaatgaatcgttctattcgtagagtagcacaattaaaaattgctacaaagtttcactttacgggatttttaagaggacaggatgtgcagaagatgtttgcttatagtgatgtgtatgttatgccatctgtgtcagagccatttggaatttctccgttagaggctatgcgttcaggagtaccaacaataatttcaaaacaatcgggggttgccgaagtgttgaaacgcgctattaaggttgatttttgggatgttgatgcgctagctgatgctatttatgctttgcttgcatatccagctttatctgaatttgctgcaaaatatggtttaaatgaggtgaatactttaaaatgggaaaatgccgcttttaaactgaaacagatatatgaagagttgaaataaaataaaaaacaaatattatgggaaagagaactttatgcttgtatttccaggttcatcagccgattcgtttgagacagtatcatttttttgatattggtaagcatagtgattactatgatgattttgctaatcgtttgtttactcgtagggttgctgatcgttgttatttgcctgctaatcgggtgttgttagatttgattaagaggtatggtaagaattttaaagtaagtttttcaataacaggtttggccatagagcagtttagaatgtatgctccagaagtaattgatagttttaaagaattagctgaaactggttgtgtggaattcctagcagaaacttattcgcactctttggcatgtgtggtgagtgaagaggaatttaaacatcaggttaaattacatatagacttaatagagaaagtctttggagtaaaacctgtatcttttagaaatactgagcttgtttattcggatgaaattggagagatggttgcaaaattgggattttctacgatgctgacagaaggagctcggcatatattaggttggaagagtccgaattatatttatacaaattcaattaatcctaagttgaagcttttattaaaaaatttcagattaagtgatgatcttgctttccgtttttcggatcattgttgggagcaatggcctttgactgctgataaatatgcctcatggcttggttctacagaaggggaattaattaatttatttatggattatgaaacttttggtgaacaccagcctgctgaaactgggatttttgattttttgtctgctttgccagaacagatttatgcttcaacagattttgaatttttgactccgcatgaggcagtattaaagcaccagccagtggctcctctaaatgttccttatcctatttcatgggctgacgaagaaagagatttaacggcctggctaggtaatgaattacagaatgaagcgcatgaggaattatataagattcgtgacaaagtgattgaattgaaagatgaaggattgttacatgattttaattgtttacaagccagcgaccatttttattatatgtgtacgaagttgttttcagatggtgctattcatcaatattttactccatatgcaactccttatgaggctttcataaattatatgaatgttctaagtgattttattttaagagttgaaaaagcttatgataaaaaaggaggtaaggaagaaaaaaagaagaagcagtaggaaaaatagatattgaagcttgaaaataattaatattgtaagcatttaaacacactaacaatgaataatagtagattaaagaaacctgcatacttatttgaagtaagttgggaagtatgtaataaagtgggtggtatccatacggtagtatctaccaaagcattaaacatggtgaaagaatatggtgatagccatatcttagtcggacctgatgtatggagatatacggagcagaatccggagtttatagatgactctaaattattccgttcttggagacaaaaggcaattcaggaggggcttcgcatcaaagttggtagatggaatgttatgggtaaacccattgttatattgattgattttagtacttttattacgcaaaaagatacgatttttgcttctttttgggagaaatataaattagattcactgagtgggcagtgggattatattgaaccagctttatttggatatgcttcgggtaaggttatagaaagttttgttcgttttcatacttcacttcggcagcaggttgtagcacaatttcacgaatggatgactggtgctggattattgtatttaaagagtgccctgcctcaagttggttgcgtatttacaacccatgctactgtattagggcggtgtgtagctggaaataacttgcctttgtatggtgaaatgaagaattatgttcctgaagagttggcgcgtcgttttaatgttgtatcaaaacagtcattagaaaaagcttctgcatggaatgctgattgttttacaactgtaagtgatattacagcaattgagtgtgcgcattttctaaataaggaagtagatttgattacacctaatggatttgaaaatgtatttacccctaaagaagatgaatggtttgaaaaacgagtctgtgctcgggaaaagtttttacagatagctcaagctttattaggtcgtcctgtggatgaaaatgcattgattgtgggaacaagtgggcgttatgagttccgtaataaaggaatcgacgtttttattgacgcaatgggacgtttgaatggagaaagtggtttggatagggaagttttggcttttattttagtgccagcaagccattctgatcctaataaagagttgttacataatttgcaacaaccaaatcaagctactcctgcaaaaaatttatatttgacacattatctgactgatgaggtgaatgatgctgtgatgaataggattaaggtgatgaagttgaataatggagaaaatgataaggttaaaattttctttgttccaagctatcttaatggtaatgatggagtgtttaatatgccttattatgacttgttaatcggtatggatctcacaatttttccatcatattatgaaccatgggggtatacacccttggaaagtttggcatttaaagttccaacaattacaacttctttggcaggttttggcttgtgggtaaaagaacattataatataaatcatccgggtattgaagttatccaacgtggagatagtgacagtagaaatgtggcatttgaaattgcagattgggtgaaaagttatttagaaggaagtgtgcagcaactgaattatgcccgtgataatgcaaaagatgtatctaaaattgctctgtgggataatttgttagagtattatcgtaatgcgtatgatatagctttggggcggactgaaatgcgtttgaaagatatgcaaatacctataaataatgaagtctcgtatattgaaaagcaattgtctgtaaataatccaagttgggtgagtgtgatgattcatcgttctataccagataaattaattgcattggaagagttgtgccaaaatctttggtggtgttggcacgatgaggctcgtgagttatttcatctgattgatgcagaagtatggagggcttgtggacataatcctattattttgttagattctatatcattgagtcggtatcaagaattggcaaatgatgcagaatttgtaaaaaaattaaatgatgtgtctgcacaatttcatgaatatatggcaatgaaaaatgatatgtctggagatggcgttgcttattttagtatggaatatggtttgcattcatctttaaaaatatattcaggaggattgggtatacttgctggagattatttaaaagaagcaagtgataaaggaacgaaaataacggcagttggacttctttatcgttacgggtattttacacagaaattatctgcaaatggagaacaggaagcagaatatgaggctcaagattttatgaaaattgcagtgactccagttcgtgataaagatggtaattggatgactgttagtttggtgtttcctggtcgcaatgtatatgcccgtatttggagagttgatgtaggtaggattgagttgtatttattggatacggattttgaagaaaatttaccggaagatcaaagtatcacacatcatttgtatggtggagactgggaaaaccgtttaaagcaggaattggtattaggatgtggaggtattcaagctctgcgtaaattgggtattcaagcttcaatatatcattgtaatgaggggcatgcagcttttataggcttggagcgtttgaaagaatatattacgggtgaacatctttcttttgcagaggcaatggaagttgtgagggcatcttctttatttacgacacatacaccagtgccagcaggtcatgatgcattctctgaaaatatgttgagaacttatatttctcactatgcagaccgtctaaagattagttgggagcaattgcttggtcttggaaaaattaatgtagctgatcaaaatgagaagttttctatgagtttgcttgctgcaaatttagctcaagaagtgaatggtgttagtcgtttacatggtgatgtaagtaaggatatatttaagggtatgtggccaggatatgctccggaagaattgcatattagttatgtaactaatggagttcactatcctacttggacagctcccgaatggaagaagatagaagagaagatttttggagaagattttaaaatgcaccattatgataagaagtgctttgaggaaatttattcagtaccagacgcgacaatttatgaagtacgtacaaaattgcgtaagcagttaatagattatataaagaataagatattggtcgatccggtgaaggttccttattttacgccaagacaagtgattaaaatacaggaaacattgagagatgatgtcttgactatcggtttcgctcgtcgttttgcgacttataaacgtgcgcatttattgtttcggaatttagaccgtttggatgagattgtaaataatccgactcatccagtgcagtttatttttgcaggtaaagcgcatcctgcagataaagcagggcaagatttgataaagagaattgttgaggtatctaaattgccgcaatttataggtaagatagtatttttacctaattatgatatggatttagctaaaagattagtgcgtggagtggatgtttggatgaatacaccgactcgtcctttggaggcttctggtactagtggtgaaaaagctgcgatgaatggagttatgcattttagtgtattagatggatggtgggtggaagggtatcgtgcagatgcaggatggatgttacctgcaaaacgtacttttgaaaatcagggactacaggatgaattggattcagaaatgatttataacattattgatgatgatattgctccgttattctatgaaaaagaccaaagcggattatctccacaatggatatgtatgattaaaaatacgattgcaaaagtagcttctaattttacaacgaatcgaatgcttgaagattatgaacgtcaatattacataccaatgtctgagcgttatcataaaatgatagctaataactatgaaatggctacaaaaattacagaatggaaacgtaaagtgagcagagaatgggataatattgaattagtaggactgactttgcccaatcgttcaaagcaagtgattgcgttaggaaagtcatatagtggggaagtgaaattggagttgggagaattgaatatgcatgaagttggtgttgagatggttgtcgctgaacaagaacatggtagacaagttatacgtgctaggcgggattttactccggtagagcaagaaggaagtgttgctctttatcgtatagaagtaactgccgactctcctggattattgatgttagctatacgtatttatcctaaaaatggattgttgcctcatagacaagatttcgcattagtaaaatggttgtaagtgtcttggtttattgagtacaaggctatgagcttataactcatagcctttgttctattttgttctgtaatgattgtctcgtagtattgttataactttatcttttacctctccctgaataattatttctccgtctttgactgagcctcctacaccacatttattttttagtagtttggcaagttcttttaaatcgtcttcacatccaacaaaaccttgaataagtgtgactatttttcctttgcgttgtttggagtcaagcaggacgcgaaggttttgtttttctggtggtactgtttcaatgatttcttcttcagaatattcgtaattgtaatcaggatttgtagaatatactacatttatacgattttttctttcgtttttcatggcgttttatattaagcaataattgaaaagaccgtctatattctttacggtcttaattaaaatacaaatatagacgtttttgtttaattttgtgttaaatgattgtttgtgcgaaaatagagagtaactttgtatgctgtaatgtgatatgagaagagggggaaacatgcaaagtaagttataattgcaaactataaatgagatgaataaaattctgaaaaagacgtatttctctgaacgtgtagttcagttggtcgtagaagctccgctgattgcgcgttcgcgtaaaccgggaaactttgtaattgtgcgtgtaggcgaaaaaggtgaacgtatgccgttaacgatttcggatgcaaatgttgaacaagggacaattactttagtggttcagaaaatgggtgtttcttccactaaattatgtgatttgaatgagggtgattatatcacagatttagtaggccctctaggaaaaccaactcatattgaaaaggttggtactgtattggcatgtggtggtggtgttggtgtagctcccttattacccatcattcgtgcatttaaggcagctggcaatcgtgtgataagtgttttggctgctcgtacgaaagatttgattattcttgaaaaggaggtccgtgaaacatcagatgaagtaattattatgactgatgatgggagctatggtgaaaaaggcgttgttacagtgggaatggagaaagtgattgagcgagaaaaagtagatttgtgtgtgactattggtccggcaattatgatgaagttctgcgaattacttactcgtaaacatgatatacctacaattgcgagcttgaatgcactgatggttgatggaacgggaatgtgtggtgcttgccgtgtgactgttggtggtaagacacgttttacctgtgttgatggtcctgagtttaatgctcatgaaattgactttgatgaaatgttgtctcgtttaggaggatttaaaaaagcagaatctgaaaaaatggaagagtttgttcaccatcatgattgtgctttaagtgatagaaatgcagagtggcgtaaagaattgagagattcaatgaaggctaaagatcgtactgctattgagcgggttgtaatgcctgagcgtactcctgctgagcgtatcactagtcagcgtttggaagtgaatactggtttgacgaaagaaatggctatgttagaagctaaacgttgccaagattgtgttaatcctacttgtatggaaggatgtccagtaagtatcgatattccaggctttataaaaaatattgagcgaggagattttttagaagcagctgcagtattaaaacgtactagtgctttgcctgctgtttgtggacgcgtttgtcctcaagaaaaacaatgtgaatccaaatgtttttatttacagaagttgaaaaaagctcctgttgctattggttatttggaacgttttgctgccgattttgaacgagaatcaggtcagatagctattcctgaggttgctgctcccaatggtattaagattgctgttattggttccggaccttcggggttgtcatttgccggtgatatggtaaaacgtggttacgatgtaactgtatttgaagcattacatgaaatcggaggtgtattgaaatatggaatcccagaattccgtttgccgaatcatattgtagatgtcgaaattgacaatctgaaaaaaatgggcgtaaagtttgttacaaactttattgttggtatgacagaaggtattgaggatttgaaaaaagagggattcactggtttctatgttgcctctggtgcaggcttgcctaattttatgaatataccgggagaaaatgccaatggtgtcttgtcttcaaatgaatatttgactcgagtgaatttaatgggtgctgataatgaattttcagatactccggtatatcgtggtaagaatgttgtcgttgttggtggaggtaatacggcgatggactcggtacgtacagccagacgtttgggggcagaacgtgcaatgattgtttatcgtcgaagcgaggaagaaatgccggctcgattagaagaggtaaagcatgctaaggaagaaggatgtgaatttatcactttaacaaatcctatagaatatattaaggatgaacgtggctatgtgaagcaagtacgtgttcagaaaatggaattaggtgagccggatgctagcggacgtcgtcgtcctgttccaatagaaggtagcgagtatctgatcgatgcagatgttgttgttgttgcagtaggagtatcgcccaatccgattgttccgcgctccgttgctggattggaattgtctaagaaaggaactatcgtcgttgacgaagaaactatgcgttctaatttgccggaattctttgcaggtggtgacatcgtacgaggaggtgctactgtaattttagcaatgggagatggacgacgtgctgctgcccatatggatgaacaatttaaaaaacagaaataatatactctgaatatgatgaatttataacggctttgttaaatcaaagccgttatttttttattaatattttactgtacgtttaggagatccgctccatgaacatccaaggcaatagatggtttctatatcgaatccttcaaggctttcacctggtttggaaggtattacctcaaaatctgttgaaacataaactaatctacgctcgccttgagggtttagtacgtaaaaatttgctattttgcattgtgggcataatctttttctcataattcaataaatcgaataatatttatgtaatcttgtttttattcttttgtaaaggctccaagtccaaataaggcaaaatcatatcgaataggatcagttggatcaaattctcgaagacgttccgttagttcttttacggctatagaatcattctgtttacgttttaacaatcctagttggcgactgacattgccggtgtgcaaatctagaggaattaatagagcagccatgggaatatttttccataagccgaagtcaatacctttggaatctttacgaaccatccagcgtacaaacatgttgattcgtttacaagcagagcctttatcaacattagcaatatggcgtaaaactctaggttctgctggaatttgcgtaaagcagtgataccagtcgcttaaaactttaaacatgttttgattttgttgccaagaatcggtaaagatggtttcaagtcctccattgttccggtagatatttgctagcgaccgtataaaataaatacagtcatagccattaaatgttcggtgcttaaaatatttgaaacgttcaaactctgaatctgtcgcatgcatgataaaatcataaggagcgtaatccatatagtgcattagttccttacattttttgataattgtcggacgttgtccccatgctagtgaggctgcaagaaatcctgatatttcaatatcctccttgttttcaaaagttttgggtatttgtatgggatctgtttctataaaaaaatcagagcgacaatattcattgtatttttcatctagaagttgcttgatttcttttgatgtcattgtattcaaatttataatttgaaatatgctatattttgtgtgctcgtaacatttctcgtttcccaggaggtcctgggaggcgtttgattgtaaatccaacagtccgtagagcctgttttacgattccttttacacaatatgtaacaagtattccatccggatggagagatgtgtgaaaatgggtaaatacttctgttgtccaaagatggggttgaacctcgggattaaatgcatcaaaatatacaatatcaaatattggtggcatatcaaaatcacgaaaatcgcatttgtgcttacatatactgaagaaaggtgtcagttgctgttctgtttcccaagggattgtatgtattgtattaaataatgatttatcacaagagtcaatctgcatagtatagtttaggtgttttatttcttctagtgataatggatatttttcaagcgtatggtaacagaccggttgttgtttttcgtgggcgtgtaataatgtcaagtatgcattaagcccggttccaaatcctgcttccaaaatatgaagacaaggtgtattaggatgagtatccagccaataatcaaatccagcccctaaaaatatatgttgggcttcttgtattgcaccatgaactgaatggtaatgttcattcagttctggcacatatagagtgacgcttccgtcttctgtctcaacaaattcatgcatattagcagagttcagcacgtaataaatttacaaattctatgatatcactttctgtcgtatcaaaagaacatacccagcgaacctctgaagcattttcgtcccatacatagaaaaaacatttttcttgtaatacttgtattttgtcacgagggatgatggcaaatatttcattgccttgtacctcttgggtaatccggactccaggtattttagttgcttcatttgccagtttttgagccatgcgattggcatgagatgctgttttgagccatagattgtcttttaatactgccgaaaattgggcagcaataaaccgagtcttcgaatgtaattgcattagttgtttgcggatgaaaggtatttcgtttgctgttgaagtgttgaaaaagataactgcttctccaaacatcatgccatttttagtacctccaaaacttaaaacatcaatgcctacatctgctgtgatttctcggggggagcagcctaaataggcgacagcattggaaagacgcgctccatccatatgtacatacatattatgtgcatgtgcatagtcacatatttccttcaactcttcccggctatagactgtacctaattctgtgcactgtgtcaatgaaataattttaggctgagcatggtgttggtctccaaatccgtgcatatgattttcaatcaatccgatgttaagtttgccgtcaaatgttggtacagtcaataacttactgccactttgtttttcaatagctccacattcgtcaacattgatatgtgctgtttctgcacaaatgatagcatgatgcgaacgtgtaaaagctgataggctgaggatattggctcctgtgccgttgtatacaaaaaaaacttcaatattctttccgaatattgctttaaaatcagcaatggcttttgcagaatattcatcttcgccataagagtgctgatgaccatagctggcttcttccagtgctttaaatacctccggtaatactccggaaaaattgtcacttccaaatcctctaatcatgattgttgggtttatacttagtttaagttattggcaaagatagtgatttgttggaatttttcgacaagttagaaaattgtattatcttggtcctccacggctcttgcatttaaaaacccgcacatttaacttgttttgacaagaaatgctttatatttgcgcatgacgatgcagaagcaccgcctgtggtgtttcttttgcttcataaatattttttttgtaggtggtttcaagatcgatttaacattgatattgtcaccacctttatttttgctatagcaaaaatagtatttatattgttgatatacaagtttttgtgctactatttacaacaaaagagacacttgaaattattcaacaaaagcattttagcgcacttgcaagaatttgtaaaaacagtaccggaatatcgaagaacaaacaaaggaaacatcaagtacaaactggaggatatccttatgcttgaaataatcgcacgtctgagcaaatgcacatccagagctgacattattcaattcggtaaacatcatttaaaacgctttcaatctcatggcattttctttaaaggactaccttcagaatcgacgttatgtcgtgtatcccaaggaataaaccatgaagatatggctaatgtggcatctgcgtttgccgctgccttttacaaggacactgccaatgatacagccgacatcatctgcatcgacggaaaagccatgaaaggtacgatatacgaaaacggacggaatccggatattgtatcagccttttccacgaagacagcatttacaattgcaacagacatttgccaaaagaaaagcaatgaaatcactgctgcccctaaattattggataaaataaaggttgccggaaatatcattactgccgatgcaatgtattttcaaaaaacgataacaaacaaaatccgtcaaaaaggaggtgattatgtcattgagctgaaagcaaaccaaaaatcattacgctacggaattgaagacagtataaaaacggcaagtcctattgatacttataaagaaggacctgttctggaacatgggaggattgaaacaagaacatgtaaaatatactcaggaaaagagcacatcaaagatcgtaacaaatggaacgaggattttactattacctcaaatccgcaactacgcgcctaatatgatacagaagcgaaaagaatctgcatcgttagtaaaaagggggcacagtgcatcgaatgtcaccataaagacatataaatgccccttaccccaccatgcgacttgaggcaatacgcaaaatcacgactataagttgtcggtgttatccaaagtcattctggaacacattggcataagcattgttgcatgaatagatattcagcacatacttccttgatgtcctgacccatttggctggcacagagatgaacttaaagacaaacgtcttgatgcggcttgttgctttgagtccgaacctcttcacgtcaagcctcgccatgatgaatttatagaagttgcgtatgagtgccataagcagaagaaacaccgtgttttctcccataaaggattttggaagcctgttccagccgaatccgttattcatatcatcgaagatgcgttccttccctccacggaggttatagaattcgacaatctctttctcggaagactcgtagtcatttgtaaggatgcagcggtaggtgtattctccttcccacaggtcgagttcgccgtctatccgcttctgtctttgaatcacaagacggtatgccttccctttccatttctcgatgagaatggaggccagctcaaactcaatgccgcccaattccactttcttccaacctctgagggcaaagatgtcattgtagagcgaactgcatcggttagcacggatatagaaggtcttgcagtgtttagcaatctcttccactatctcttcagaacacgagccgcaatcagctctgaaacggttgataataagcttgttttgttcaaacctttcaaagaacctcttcagcgtgtccttctggtggaaacggacatttgtgttgccgtcgctgttctcaatgccgacaatcaagttgccaataaccgccacgccagggcgataaccaaggaacttcttgtatgtaggcttcgcatcaaacttctcagcctctatgaactggtggtcgaagtcaacgtcatacccctcgccctctttcagctgccctgtggacaataggcaattgaggagcagtgtattcagcttgtctgccgtgttgaagtcgtaggtcttgccagtgtcggatgtgtaggaaatgttatcctgggtcagttcctttatggctctaagaatcgtgtcggcactgcatgtgcgaagtgtcggatgaagcgaaaggtggtacatcagatgagtggtgacatcctcgatgcatgagccgccacaaaaataaacgctcataagcgaacggatgatttcgctgtattgataaccatacagcctgcatctcataccgagggttgagtcgattacagatgagagtctggagtcaaattgctccattattgaaaatattcctccaaaaggagtgagtttctcggatttaattgctacctttgccatgtctgtcgggtttgatacatattttgatttgcaacactaagataggtgaaaaatctgacatggcaaattcctgagcaactttttgttgctcaggtacttaaaaagttatatttgtaatagtgttgcggaattaaggtattatagaaatacttacatctacagaaaagaaatccgatggttcctttgcttcagaacaacggctgtatctttcaaatatgaaaggctccgccaaactgttcaataaaataacaaagcagcattggagtattgagagcttgcattggtgtcttgacagaaatttactgcaagataaaataaaacgaaaaacagagcaggcggctagaaatcttgacacgattcaaagaattgtactgaacattattgcggcatggaaaaacagaagaaaaaaagtagcggacaaacaaaaaggtgttgctaaaattttaagagaattgtctatgaactttacaaaactgatacagtttctcaatcaaaaatgagaaaaaatgattttttaatactaatataaaatattgatttacagtcatgtttaatcttgcctatattatgttgtatgggtaggggatgcctacccattactcagaagttaaatgcaagagccttgttggtcctcaaatttaatatataacgccaatgtttttacatagatttaaattaaagaattactgttgtgtggtaatctggatgtgtatcggtttgtttatggttgcttgtgccccaagagaacaaaccatagttttgttgcataccaatgatagccatgggagtattttaccggttagtggtgtaggggggatggcggaacgggcaacagtcattgatagtttgagaaagttgtattctaataaaattttgttgcttgatgcaggtgatttcaatacagggcaggccgtttccaatatgttttgtgctcgtccggatatattggcatataattatatgaaatatgatgcagtaacattaggaaatcatgaatttgatcaacctgtggatacattgttgcaacagatgcatttggcaaattttctttttgttatttctaatgtattctatagaggtgaaccattgggagcagaaactttggtaaaagaggtaaatggagtgcgtgtgggactttttggcatattgactaaggcaacggcacagataagtgttaatgttcaagatgtgacttttgttgatgaagtggaagcagctcgcaaagctgtgaaagtcttgcagcagcagggggtagatttggtaataggaattgtacatttaggatttacagaatctactcctgagtacattacttctcaaaaattggcggcagctgtagagggtatagatattcttgttgacggtcattctcattcttacattgaaaaacctctgcgtgtaaatgagacatggatagtgactgcaaatcaaagtggacgatttataggtgaaggaaaagtgaaagtacgtagtggtgatatcatttcttttgattggaagcctctaccagtaagcaatgtgcatcctcatgaaactttacaagctgttttgcaaccttatgtggatgttgccaataaagatttgcagacaatcataggcgaggctactgatacctttgtcttattccatgataaagaaaatttaggccgttatggtgaagttgcattgggaaatcttattgcggatgccttgaagtggaaagcggagcaattgcaattgcatgtggattttgctcttacaaactctggcggtattcgtgaagagttgcataaaggtaaagttacaaaaggtgatattctttctattttgcctttcggtaatgaattggaagtcgtgtcgctgaaaggagatgatgttattaaattatttgatttcttggctactgttgaattgggtagaggaacattcccacaggtatccaaagaggtgagagtggtctttaatcgggaaagtaagactgtaacctctttgacaattggggggaagcccatagatagaaatcgtatatatcatatggcaacctgtgattatgttgcagctggaaaagatggttattctgcaggattgtcaaatgtagtagaccaacaaaagacttctgttttgatggcagaaaccttgatggaatatattaaacagcaaggccaagtctctcctaaaacagaaggacgtattaaattttaaaattgtatgtcagtgtgttttaggtggatagtttgttgtttgatgcttttgtctgtacatgcactatatggcaacaaaagagattctgttatttataaatcggtgcattttttaggtgcagatatcaggcctgcttatatatttcctactgacattttttttagaggagaaaatgccaggcatacacctatgcgtaagaatttttctgcttatttgaaatacggctttaaatttttgtctaatcattatttgggagaatactatccttatgcaaatcagggtatcggtgttggatataacacattcggtaattcagcggaattgggttgcccattggctgtctatgtttttcaaagttcgcggattatagctttaaataccaggttgtctttggattatgaatggaattttggagcctccttcggatggaaaaaatatgatgagataacgaatgcttataatagagttgtaggctctaaaattaatgcttatatcaatgtcggacttcttttaaattggaaattggcagcatcaactcatttgcgtgtaggtgtcggtttgacacattattctaatggaaacacgcgctaccctaatgcaggtgttaatacgattggtggaagtataggcttcgcacattattttgtaccagctcgaaagcgagaggtgtttaaggaatcccttattgctgaaagggtgaaattccattcttatgtaagttatgatcttatcgtttatggggcaactaaaaagaaaggagtattgttagagcaaggagcggctttgttagtgcctggttcttttgcaattgccggcatcaattttaatccgttgtataattttagcaggtattttcgtgccggtatttcgttggatatgcaatatgatgaaagtgcaaatattgcaaagcatatcgcaaatacagaaccttccattgatagtgaaaatattaaattctatcgtccgtcagctagagaacaatatgccgtaggtctatccgttagagcagaggttgtgatgcctatattttcgataaatttgggtataggaaaaaattttatatgtaaaggtgctgatactgattcattttatcagatatttgccttgaaggctaatatgacaaaaaatctgtttctgcatgtcggttatcagctttatcgttttaaaaatcccaataatctgatgttgggggttggtttccgatttaatgcacgtggcggtaaataagccttaccaataaatgataagtccgaccaagcctgcaatgcaaatcatcaaaataggatgaattttgtatctccaggtgagaataaaagcaccgataaagatcagtacacttttataatcaataaagttttcttggttcatcagcatcaatccggctgcggcaatcaaaccgacagtcataggacggagacctgagaatgctgctgcaacatatttgtttgctttgaatttttcataaaaataggaaatgagcaaaaccagtagaaaagaaggaaagcagactgcaaaagttgctacaatggatccccatacgcttcccgttgctgtgtatccgatataagtggcgctgttgatgccgataggaccgggggtcatttgcgatatggcaacaatatctgtgaattgttgtgaggtgagccactggtgtttttccaccacttcgtgctgaatcaacgaaagcatggcgtatccgccaccgaaaccgaagatacctattttggtgtacacgcagaacaattgccagtaaatcatcatagttgtttatttttaattttctcttttatccaaaatgtatatagcagtcctcctattataccggctaaaatgatgtatataggtgaaactccgcatttccagatgagtagcgcacctaatagtggaaatatcagttcaaaccgttttaagtgtagggagcgggctgcagaaaggcatggaacaacaattaatgctactacggcaggccgtatcccatgaaaaatcttcataacccagatattgtcttgaaagtggttaaagaataaggctatggctagaataatgcaaaatgatggcaatatcgtaccaagggcacaaatgatgctgccgggaatccgtcttaatttataacctacaaatatggaaatattgacagcaaagattcccggtatagattgggtaacggcaaaaagatccagaaaatcatttttctccaaccaaccgcgattgacaacttctcgctcaatgagcggtatcatggcataacctccgccgatggtgaacatcccgattttaacgaaagtcagaaaaagtgtccaatacatttttgattgcaattttaaatggtaaatagcctttctgtagatacgcaaaggtatactttttttgttacttttgtcacataacagatagaatggaaggttagattatatggttatgaaaattaataaaacgaatgctgctcgtttgttggataaggcaaaaattaaatatgaattgctaccttatgaagtggatgaggataatttggctgcaacacatgttgcagagcaactgggtgaaaatatagcacaagtatttaaaacactagtcttgcgtggtgaccgtaatggcatttttgtttgtgtaataccgggcgattgtgaggtggacttaaaggctgcagccaaactttccggtaataaaagtgcggagatgatccatatgaaagaactgttgcctaccaccggatatattcgtgggggatgttctcctattggaatgaaaaagccttttccgacatttatacacacaacttgtatgaattttagtttcatatatatcagtgccggagtgcggggattgcagataaagatagctccggctgatttggtagcctttacaagtgctacagttgcggaattatgtgtttaaattgtgtgttttggaaatagcaggcaagttgatagattggtatgccaggcataagcgcgaattgccatggcgtgaaaccagagacccatattgtatctggatatctgagattattttgcagcagactcgtgttgcacaaggattggattattatcaccgttttatgttgcaattcccgaatattcgggaattggcagaagctcccgaagatgaagtgatgaaatgttggcagggattgggttattatagtcgggcgcgtaatctgcatgcagcagctaaagatatgatgttgcgcttcggtgggcgattcccgcaaaattacaaagatgtgctttctttgaaaggtattggcgattacactgcggcagcaatctgctcatttgcgtggaaacagccttatgctgtggttgatggtaatgtgtatcgggttttgtcacgtttttttggtatagaaactcctattgacagcaatcagggcaaaaaggatttcaaaacgttggctcaggagttgatagatttgaagcatccggatttatacaatcaggctatcatggattttggtgctatacaatgcacacctcaatctccggattgttgccggtgtcctttgcagggtggttgtcgggcttatgctgaaggacgggtagatgttttgcctgtaaaagcgggaaaaacggttgtaaagccccgttatttcaattattttcatatttgttgtggtgatgctactcttttgcatcgtcgtgaggcaaaggatatttggcagaatctttatgaatatccgttgatagaaacggcagaagccgttgatttctctgaattgcagcagagtattgaatatcggaatttgatggcaggtgttgaacctgtgcaggtattgcagtttgtggaaatgccacgtcatatactttctcaccggattatatatgcacgtttttacaaactggcagtaagtcatttcggaccgggaatgtcggatttctttcaagtgggaatagatgaacttgacaaatatgctgtccctcgtttgattgagttgtatcatggaatggaatccgtctgatagataatttaccctcattgtgctttcttttcgtcctcttttctctcactttcctccctcttaaatatatgatatctatatgtcaaagataacacaactataagacaaagataacaacttgttatctttgtcttattgttgccatatatttaagttgaagatgtatgggattttgacaggagaaaaaagggagatgtcctatattgttatactgaggatagaaaacagttgcgtttgcaatgattttttatcttaccctttcgacactcactccgtctatatacaaaccctctccatcttccggagtgccagaataggtgcggatttccatgcgcaaccttgtagcattgataggggcacgcacaatcttgccttcaagtatatcgatatagccgtctgtttgattccaatagttgccgggatgtagttctgtcgagaaactgttcagaggcgtgctgccttgcatccaggtgcaccagtaacgccatttgatcttttcgttgggagcataggcaaatattttcagttgataacaataaccaccatctatgaatacgtcttgatataaataggtagaaccatttaattgtacagcgtaattaccgtgatgtaccggtagcatcacctgtttgatgagcttgcttttcccgctgccgtctaatttccaaccggaaggaatgccttctatgaactcctcttcaaaatcggggttgtttactatattatacccgtctccgctaccttcgcatggttgctcttgttccggtgtcggtgtttcccaattttctttgatagtgtctttgtcccattcaacaagagttgttgtgaaatcaacaatattcatttccggtttcgcctcgaaagtgatatcaatgcgagtgattttattggctgcaatttcctttatttcatactcttgtgatacatacttatgggcattcgaggttagggtcaatttacttttcttggaattctgtggagggaatacgagaagttgggttgtagaaataccattaatagcttgtgttgcatctgcttggatggtatgcgtacctttgtcataaatacctgtcagactgatagatttaggtatgttgtttacttttaattgtaaatcagtgagccattccggcatattatgtacaataattaaaagttgaccgactttgcgttccagttggaaattgaagacgttgtttccatcagcttttatttccatttcgcattgtcccatcaagtggtctctgctgccaccctgagtctgggattttagtaatatagcttcgggagaggcattttcttcatacttccagtaaactgattcgctggcattcgtgatgcagtaggcgtcatatgttcctggaaataattttactttatattggtttttgcttccgtcttgttgggcttcttgtttgtctgtgcgttgattgatcttgtcataaacgaataattggcaattggccggcagaccgtagaaaccgttctgttgggctgtggaagtctggattgaaactgtctgtttgtcgccgtcatagggccagggctccatgctgcggtggcaagaggcaatgcatataagtatccctaaaaatagaatctgtctcataaacaaatgctctaaaaccgtaataaaaatatagcgttgtaaaggtataaatttttcagagtatgtctatgttttttctttctttttgtcctttgttgttaaaagtggtatttataccctccttaaaaataatcaaacctcttatttttgtaaactgaaatttttaacaaggagaatacagtggaaaagactgactatgtattggaatccagatgttgcggcgctcgatttgccgataaaaactgggaactggaatgcccgaataaagatggggctgcattgatttttgccaattatgcaaagaaacaacttgaagtaaaggaagagttaccgggattgtataaatattccgattggttgcctgtctgtcgtgttttagaaggatcaggtgcatcggttacttataaaagtgaagcattggctgcccggttaggactttctaatttatatataacgttcaacggttactggcctgagaaaggagctacaatgaaaaccggatcgtttaaagagtgtgaagcatattctgtatgtgcacgtaataacgaccgctatgacaaagtaatggttgttgcttcggcaggaaatacggcaagagcttttgctcgtgtttgttctgaaaataaaattcctttgttattgtgtcttcctgaagataacttggatgctttatggtcggcacagccgcttgatccttgtgtaaaagttgtggtgactgctaaaggaagcgattattttgattctatacatctttccaatattatttgtgaaatggataagttctatccggaaggaggagccaaaaacgtagctcgtcgggacggtatgggaacaaccgttttatcagcagtaacgacaattggccggattccagactattatttccaagccgtaggtagtggtactggagctattgcagcctgggaagcgaaccggcgttttattgttgatggccgttatggtgacaatattatgaaattgatggtatcacaaaatcgtccttttacattgatgtatgattcctggaaagccggttctcgtgaattgttaccgttggatgcagcagaagcaagacgtcaggtggagattatttcagctaaagtgctgtctaatcgtaaacctccttactctttgaaaggtggattgtttgatgctttgactgctacaaaaggagatatgtttgctgtaactaatgaggaggcagcagctgctgcggctttgtttgaacaaacagaaggtattgatattgaacccgctgccggagtggctttggcttcattgcagcaggccattgcagaggctaaagtggaaaaagatgcaatcatcatgttgaatatcactggaggaggtatccgtcgctttaagtctgagcatgaattgttctataaaaaaccggattacgtatttcctgttgatgctgacccggaaacagtaaaacaagttgttgcagaattattcgggtaagtttattttaattatcaatgacataacaaatgccggaaagcacatgtgggctttccggcatttgttgtatctttgtagcactgattaacctttatgactgtaatatactccacacaatgagaaagaataaatacatgcttggtttgaagaaatatctgattgtagaattttattactccattctgagacgtgattggcggatttcaacttttttcaccgacctgctattgaaaatggttgcaattattgtcgtctctgtcgaccggtttacccaaaatgcatcggctatttctgcatcggcattgacgttttattcaacacttgcctttattccgatagtagcattgatattggctgttgcccgtggttttggagcttccaagtcattggaaacatggatgcagggacatgcttttacaaatccggacgtgatgcagtgggtgatggatgtggctggtaaagcgctcgaccatacgcaaagcaacattattaccggtttgggaattgttctgttaatctggtctgcagtgaggatgatggctagtacggaattggcgatgaaccgtatctggggcgtgaaaaaagggagaggagtggtaaaaaaattcaccgactatatgtcaattctttttattgctccgatattaatagtgttggttagtagtatcaatgtatttatgaccgctagtttgcaggaatatgcgacaagcggaagtattctggggtatgccggagctgctcttacagccattctgcgcttggcaccatatgtgttggtttggtttctcttcgtttttctatacatgtttatgccgacaacgccggttaagtttaagtatgcattgctgtccggagttgttgcaggtacaatatttcaggtggtgcagtggttttatcttcgtttccagataggggtcagttcctataatgccatttatggaggattggctgccttgcctttattgttggtctggttgcagttgagctggagcatcgtattgtggggtacggaattgtgttatattatgagaaatcgtcactttctctatcgtggtacgctggatgctaatggcagatgggtggatgatgtacatacgtccattaaaatgttgcggtttatttctgatgaatacacccataacaatggaggaacttctcttgcattaatctgtaagcggttgcggattagttcaagtaaggcgagggttgtactgcaggaactggtcgatcagcgtattttggttgaagtgaaagatgaagatgatgtatcttattttccggcgcttgattttcataaactttcgttggcagacttgattaacgggctttcccatatggaggacaaccggggggaaggctggaaggagcgttatgtggaagctatcagaagggaattttccggggatacttttgcatgatatgaattttttctgtaaatttatgcgcaaattttcgtgatatgagaagaaagatagagctagagtacattttttcatcctctgtaaaggtattgtattcccgtataagtacgcctgccggtttgtctgaatggttcgcggatgatgtgtttcagaaaggggagaagttcgtttttgtgtggggcaggacggaacatcctgccacgctgttggaggcgaagcccaattcaagggtcaggtttgcatgggatgatgcggatgaggaggaatatttcggtttcgatatccatgtcgatccgctcacggaagatgtggctttgatcattaccgattttgtggatgaagatgaagaaagtgattctgtagagctatgggataaacaaatggatgttctccatcgtaatcttggggcttgatagtttgagttttgccgattaatagtacctttgcacctgtttcgtaagatagaattattgacaggttatatttgacaaatgaaaaaactgcatatatttatgctcaaaagtttcattggaccttttgcagcaacatttttcatcagcatgtttgtattgatcatgcaatttttatggcgaagtatcgacgaactggtaggaaaaggattggaggtgtcgattattgtagaatttctctactacttggctttaaccttgattcctatggcgttgcctttggcagtcttgttgtcatctattatgactttcgggagtttgggtgaaaattatgagctgatagctttgaaatcggcaggaatttcgctttatcgcatcatgaaacccctgattgttctgattgtcatgcttaccggattggcattcgtgttttcaaataatgtattgccctatgccaacttgaaattgggtagtctttactatgatattcgtaaaaagaaaccggaaatgtccttgcaggaaggtatattcaccaatgatttggagggatatagtattaaggtggaccgaatcaacaagaataccggaatgatgtacgacatgttgatttacaaccataaatcaggaaccggtaattgcgaggtgacaaaagccgattcgggaatgatgattaatgatgtgagggcaaataaaatggagttggttctttttaatggtcatagttattccgacgaaggtatgaagaatatcaaccagcggcgtactttcccgtttcggaggataaaattcgataaacagattgttttgattgatctccctgaaaacgatttgaaacgtacggatgaaaatgccttccggtcagttgcacagatgttgagcttgaagcaattggatgatacaatcgcttctatgaagcgttttgttatggagcgtaagaacaatgatgcacaacggatgctgaaatccaattaccggaaaagtaaaaattcaaatgtgaagcgagatagtgtgcttttggttgagagtaagggtatgtattgcaatccggatagtctttatgctacatttgatgcagaagaacaacaacgggctgttagtaatgcggtgcaatatgcccgcgaagtccgccaacgcatgcaggatgacatacactattataatgcccaggacctttccattattaagagtgaattggaatggcatcggaaattctctctttcgtttgcttgttttattttcttctttatcggagctcctttgggggcaattatccgtaaaggcggtttgggaatgcctgttgtcgtatcagtattcttgttcattatatattatatcatttcaatgatgggcgagcgttctgcgagcaaagcggtgatttcaccggcttttggaatgtggatttctgcttttattctattgccgttgggggcgatactgacctataaatctgtcaccgattctgagatgatgaatacagaggcttatcataaattttttgataaaatattgcatttctttaagaaaaaagtgtctaaagggcaattgcagaaaaattaaaaaacatgacgaaagaacagttacgtatcgtatatatgggtactccggattttgcggtttatcctttgaagcatttggttgaaaatggataccaagtcgtgggagttgtgacaaatcctgataaaccggccggtcgtggacagcagttgcaagagtctgctgtcaaaaagtatgcaaaagaggttggactgaaaattatgcaaccggcaaaattccgtgatcctgaatttttggaagaattggcttcactgaaggcagacttgcaattggtcgttgcatttaaaatgttgccggaagtggtgtggagtatgccgccattgggtacggtaaatctccatgcttctcttttgcccgactatcgtggggctgctccgataaattgggctgtcatcaatggtgaaaagtattcgggtgtctctacttttttgctcaagcatgaaatagacaccggtaatattatttttcaggagaaggtggatattacggatgaaatgactgccggtgatttgcatgatagcctcatggagaaaggggccacattattattgaagacggttgatgccatcgcttcgggtgattatccattgattgaccaaaacgaattgctgaatggtcgtactccgattcatgctcccaagattttcaaggaggatatgcgggtggattggaacagtacgctggatactatatacaaccgtatacgtggattagctcctttcccgacagcctgggcagaattgattcataaaacctccggacagtctcattcttttaagattttccggacggagaaaatagcatgtgcgcacgatcatgcattcggtgaacttgctactgatggcaaaaagacctttgatgtatatgtacccggtggtatcttgcgaatattggaattgcagttggcaggtaaaaaacgtatgcttaccgaagattttctccggggctttaaattggaagactaccatttataaaacaagtattgaataacattctttttatgattatagaaacagtttctgattgtagtgcggaaactgttttttttatatttccgaacaacctcttcgtgctgttttaaaaaaaaagacaaaaaaagtttgttttttctcaccccctgatggtatatttggtgttatatcaatgtaaacgaatttatgacatgaaaaaacaggctggagcaataaatctacaagatgaaaaagtactgcaggaaatgtttaaacgtttttatgcgcaggcgtgtctgtttgccggccgttttttgccaaaagaagtcggagccgatatcgtgcaggaagcgtttctttatatgtggcaaaatatgccagtctttgacagagaggagtcgtttagagcatatttgtattgttatgtgaagagtaaatgtctgaattatttgcgtgatcatcgtgaggatttgaatatggaggtattggatgaacggattgaagatgaagaaaaaatcgaccattggattattgaaaatgaattatcagcaaggattcttcacgaaatagaaaaattgccggaaattcggaaaaatatcatgttgatgcgtttggacggacattcgtatgaagagatttctaagaaactaaatttgaatatcaatacattgaaaactcataaaaagcaggcttatcgcgaattgcgtgggtatctgtcagatctgagtgaatatgtgatgtttgctttattatttataacattatgtttttaaaggagaaaatatgaaaagagtagagaaagacatattgatgagcgatttaatatataaacaccttcggggagccttgaaaggaaacgaggcggatattctggaagcttggttgcaaaaaccggagaacatgaaatttttcatggaactgaaaaattctgatcgtttgtacgaagatgttgcaaaattgaaatatacggacgagcaggctgcctggtggcaaatggaagctaaaatggcaaaagttcgtcggagaaggtggatgcgtcgattctattcaattgcagcattggttattgtagcactcggttgcggttggattttattgagcgaatctaaaaaagaagaagctaagatgattgtgccggtgatggcatcaaacaatcaggctaatgtgacaatctggaaaatggcagacaaggagattcatttgaatgatactttgaaagagttggtgttgccgcaagagacgaatttgtcggttgctaaggttaatgaggcggattccttggttgaaaaaccggtttgctatgaagaggtgattacggctcagaaagataaattgcaggtggtgttgttcgatgggacgcgggtatggctcaatggtggcagccgactgaaatatccttctcgttttgctgcggattgccgggaagtcgaattatttggagaagcctattttgaggtgacgaaagacacgttgcgcccgtttatggtacgtacggcttcggcaaaagtggaggtgttgggtaccagtttcaatgtatctgcacaggcagaaaaggagtgtgtcgctactttggtggaggggcgggtcagaatgcaggatgccgaggaacacaaagtagtgcttgcacccggacaacaggcagagttggacgaacaaggcggatggaaagtggaagaggtggatattcgttattttatagcttggaaggatggaaaatttgctttcaaggataccaaattagaaactgttttggaaaaattggctcgttattatggtgtacaatttaaatttgaaaactccaaagtagcggcattgacttatacgacaatcattgagcaatacgaaaatgtggaggatgtgcttttgattcttgaaaaagtaggtgactttaactgcgagcgtataggggaaaaattgttttcggtaaaaagaaaataggcaggagaccttcgactttctcccacctatccaattaatacaattaataaaaacaaatctatgaaaaaaaaacgagctaacgtttcccggaaatggggaattttgcaaaaaagaaatattctgcggaatatttcttgtgcgttgtttttcttgttcggctctttggggctgatggcgcaaacagcgcaaacattcactgtgaatttcaaagacaaaagtctggtggaggtctttgaatatctgacatcgcatagcgattatgtatttacgtacaatagtgcggaaatcaaagcccagacactgaaagtgaatcagtctttcaaacaggcatcgcttcggcaggtgttggaaaattgcttgaaagatacgccgtttgattttgaactggtgggcaagcatgtggtgattaagaaaaaaagtatcaaacagcaggctgttaatatggtggaagtgaccggtagggtgagtgatgagaagggtaatgctttgcctggtgcaacggtgttgatacagggtacttcgcagggtgtctccactgatatggacggtatgtataagatacatgtccgtcctacggatgttttacgtgtgtcttttatcggatttgaaacatcggttgtggaattgaacggaaagacaaaagtcaatgtcagtttgaatcctacagcggaaacgatggaggaggttactgtcgtagctttcggtgagcagaaaaaggaatctgtggtgtctgccattactacagtggatgtgaaaggattgaaatcatccagcagtgacttgacatcgcaatttgccggaaaaatagcaggagttataggttggcagacaggcggtatgccgggagcgttgacggaggatgagatgaataccaagttttatattcgaggaatcacttctttccagacaaatgcaaatgtagatccgcttattttgattgatggtgtagagtcgtccaagttggacctttcacgtttggtgccggaggatattgaaagtttcagtgtgttgaaagatgcctctgcaacagcgatgtatggtgctcgtggagcaaatggagtcatggtagtgacaacgaaaaaggggcaggagggtagtgtatatacatcagctcgttatgaggctgttgtgagcgtgccgacaagaaaaatagaggttgtggatcctatcaactatatgaaaatgtacaatcgggcattgctggcacgcaatccggatgcaactccgcagtatagcgttgagcgtatagagcgtaccggttctaatttgtatccttcatgggtatatcctgccaatgattggtataagataatgtttgagaatttttcactcaaccatcgtgccggtctgaatatcagaggtggttccagaatcgtacaatattatacatctgtcaattatgtacgtgatgaaggtatgttgaagacagatcgtctgaaccagtttaaatgtaatatcgagaataattcattttcattccgtacgaatctgaatattgatttgaatgccggaatccgtctgaatatcaataccgcagccaatttggataattatcgtggtccttatcaggatgttcagaatgcctattatctggctttcaatgcttcgcctgttgactttgcaccgatttatcctgctgatgaagcatccaattggcctcatatccattttggagcggtagaccagactacggtgaatccttatatgcagttgcatcagggatataaagacagacggcgttattcggctgtggcgcgtgcagaatatatacagaatctttcaacgcttcttaaaggtttggagttgcgtgcatcggtttccatgaatcagacaggatattaccagaatgcctataaaacaaaaccttatctgtattcattgaagaattatgatcatgagaccggtgtacatacattgaacgcattgaacagtctggaggcatcgagaacactggaaaaagatccccagcagagcaacagttcacaatcaacccagatgagttatgaggtgcgggcgttgcatactgcggcatggaaagagcatcagacgagtctgaccgccgtattcaacgcacaggaaacaagctattctaatacgcaatctgtattggacggtatccccaataggaatatgggcttgtccatgcgtggtacttatggatttagggacaggtattttgctgaagccagtttcggttataacggctctgaacgttttgcagataataacaggtttggctttttccctgcagtaggagttgcatgggtggcttctaaagagggattcttggcaaatcatacagcccagtggttgtctttccttaaattccgtttctcttggggtaaggttggtaatgacggtgtcattgatagtcctcgttttgcacacttgcctttattggataatgtcagtacaatcgacccgtctccgggaggaaacaatattgcaagacctcaggttgtttcttatccgaatgacgagctgacctgggaaattgcagaacaaagcaatcttggtatggaattgaagttgttcaacggtatcgttgaacttaatgcagatttatatcaggaaataagacacaacattcttgactatcgatatacaatgccttcaacgacaggtttggagaaacctcaattaggtaatgtcggaaaagcccgttctcgtggtatcgacctttccggaaagatccagcacatgttttcgaatgattactggctgattttaaacggaacattcacctataataaagcgacctaccgggaaatagaagaggcgacaagcaagccggcctggcagagacgcgaaggacatgagttgtcgcagacaatcggttatattgccgaaggacttttccgcgatcaggcggaaatcgataattctccgcgacaggggggaaatctgatgcccggtgatatccgttatagagatataaacaatgacggtgtgattgatgtgaatgatgccacttatatcggatttcccacaactcctcgtatcatttacggtttcagcggtttctttaatttgaagaatttcgagttcagctttgctttccagggttccggcaagcgggcattctttatggatccgatgaagatgagtccttttgtagaaaacagagctatgttgaaggccatatatgatgaccattggagttcggataatatgaccgcccgtcctttctggccccgtttgtctacccagtcgatatctgtgcataacccccaggaagaatggagtggggctgaaatcagaaaatcaacctattttatgcgcgaatgcagattcttacgttgtacttctctggagttggcttataatttacctcataaattgttgtcgagaatcagaatgcaaagtatgaaattttatgcccgtgtaaacaatccgttcctgattactaactttaaagtatgggacgtggaattgggggacaatggatttaattatccgatacaaaggacttggtctgtaggaattaatttgagtttttgatgtaatttgaataaagatgaaaaagtatttgttgtctttttttgcaggactccttttgttcggaggttgtaattaccttgacagagtgcctgagaaagatattgaaacaatagagtcggtttttgaacagaggacaaaagttgaattgtggtggaaaggtctttatgcggaattgaataccatattggccgatgtcagtttgaataccgcttatttgggttcggatgaatttgtaacctgccaggctttgtataattcgactatgtataatttggatggtttgaaaattgccgatggtcagcagacttcacaaaacccgctgggttctgtatggtataagatgtatgtggttatcagaaactgcaacacctttcttgagaatattgacaggactcttaatatgagtgaggccgaccgtaagtggtggaaggctgatgtgaaggcagtgaaggcttttacctattttgagctggttcgccgttacggaccgatttgtctggtgccgcagaatctgccggtgaatttgcctgtggaagtctatcagttgccgagacagcatgtcgacacctgcttcaaagagattgtacgtttgttggatgaggcgatggagtatgtcccgaggtatactcagcgtatgtcaaattatggtcatacattttgtctggagtcattgtatgccttgaaagcaaaagtgttgttgtatgcggcatctccattgtataatgggaatgtcttctattccgatttcaagaatagaaacggagaattgcttttcagttcgtcttacgaccgcgaaaagtggcggttggctgcggaagctgccgatatggccgctgaaatgtgtgagtcgggaggaaggggattgatgatggggactaccggcaaagagactgatttgctgaatgtgatgagtgatatagagaacagcacgttttcgcgtttcaacaataaggagtacctgatggaatggaaatacacaagagggttctatacatttactttgcctcgtttggtaggcgatatcaatcattttgacaaccaggcgctcgggtgtctttctccttccatgaagatggttgagatgtattatacggatcacggtctgcctatcgatgcggatattgcctggaattatagtaaccgctataaattaggaacggaaagttctcctgcgtatgatggtgttgtccctatgaataccgaggttgtcaatctccatcttcgcagagaaccgcgtttttatgcatctatagccggtgacagaatgtattggcagcgtggaacgaacactcccgaagtggattataacctgcttgtccaggcgcataaaggtgaagaaccgtggggtacacaatatgactttattgtcagcaattcctggcagaatattaacggctactggttgaaaaagcatttgttctcatggataccgacacaaggatatgccaatagcttgcagggtactgagactgctgcattgatgcgccttcctgaagtttatctgatgcaggctgaggcatggaatgaatatttggatcagccggacgacagggtatatgatcctttggataaggtgagagaacgtgcaggtatccttccggtacgtgaagcatgggaaagttattctaacaatccggcaaaggtgacgaccaaagtgggtatgcgtgatattatccgtcaggagtataatattgaatttgcttttgaaggacatcgctattggaatcttcgtcgctggttgatagctcatcagacgatgaacgaaaaacagtatggctggaatgttttgggaaccacgactcctgccttctataattatgaggacggtccgattgttgtgtggagtaataataagtttgtcgctccccgggattatcttgaaccgctggatgcagaggaaattttgatttcgggaatggttcaaaatccgcaatggtgattttgttcgttgcaataacgatgaatactaatgtcttataaaataaagaatgatgaaaaacaatacttttttcttattgttgtttgtctttgccttctttgcctgcaatgacgatgataatgcgtttcatcccttgaaggaaggtttggatataaagtttactccggttgccggaggggcaatgatgcattacaatttgccggatgacagcgatattttcgcaatgaatatacgctataagaactggcagggaatggatgtgctgaagacttgcggttatagcggcgactctgttttactggatggatttacaagaaaacaggaatcgataaccgccttgatctcttttgtcaatcagcgggatgaggagtcggaagcattggaatattcgttttctaccttggacagtgcaccttgggttattttagatagtttgaaagtgagaccgtcttggaacggtttccaagtgattttcgacggtccggcagtggctacgggaatggctcatgtattttatttgggaacaaatccgctgacacagcaggaagataccattttaatgagcagttttgcaatttcttccagaaaggatacccttagttttgtgcaaaagcaggaaagagcaagtaatacaatcattatacgtacggaagattttcatggataccgtgtccgtcaggaggtttatccggatatagatgcattccgtgcggagaagtggagtatgactgccgagaattttaatgatttcggtctgtcggtggaaaatgaaacagccatgaccggaatctcttatttgtttgacggagaattgaaaggattgaaacgcttggaggcttctgcccatacggatcccttgttgcgcaacggtacttgtgagtatgccacttacgttgccggtccgcgctcttatggaaaaccgatggtgcttgatttgagagagcccaagactccggcatgggtccgcctttattgcctgtatcctctgcaagccaggcatcctgttgcaggagttgctttgggagaagtctggaacggttcttatgaagacaagctcccttgtaatgtttctatatacggacatccgtcatcttcagatccgaatgcggaaggatgggtgtatttgggaggactgaaccaggctcctgaaagagatatggcgaaagacagatggtgtgcattgaccagagatgtccagtctgctcctaaagatgccacagagttggaagctcagacaccaatctatgtggatatccaactgcctccggtgaataatacatatcgttatctgaaaatgatagtaaacgatacatttgatgctgtgggcgaaaatgacattgatttgaatgaagaagagtattttacattgcatgaattggaagtttatgtaaaaaagaattaagttatgggtatgaaaaaatatatcgtaggcttattggcggcaactgccgtattgacaagttgcagcgagagtctggaagatacttacagtgattatgcaggagacggaaaaatccgttatgtggcgaaatgtacagagctacatacaactccgggatgggaacgtctgattgtgaattgggtgaacggaacagatgccactatcgataaaatcaagctggtatggtcaagcaccggcaaaagggattctgttttattgcctaatacggcagaaacctatgaattgacaaacctgccggatggtacttaccggtttgatatttgcgcaatggacaaacatggaaacgaatctttaaaagagacgacctatggacgtccatatacaagagatcatgaaattatgctggcatttacaagaggggtggtaaaatcatattttgtgaacgataaactgatttttttctccgatcgttggaacagcaatatcgatacaattaaactgcagtataaaaatgtagcgggggaaacaaaattctatgtttttgacaaggaaacgagttatgattcttttataacaattgatgatgtcagtcctaatccgtctgattccgtttatattctccgaaccggaagattggaaggatgtgcggatttgatagagtttgatcctatggcacttagccgtacaaaaattttcagttcaggttttgtaaatgctatcgagcgtcgctatggatattctaccgataccaaggagcaggaagctgagttcaataaatttgtggaaaacgtagaggagttggagtttgattatgatattgagacttttgaggatatcctttactgtccgaagttgaaaaaaatcatatttggtaaaaacagatatctggatcctatacatcgatatgcggtggacgatgattatcccaaattattgacggatgcatcaagaagtattcaggtgttggacaaggcaaatgaaattttgggtatgaccattgattggtatgggggatggaatatcccttatttcaatgattcgggagaactgccttatatgacttatatggatttttctccgcttcctgaaatggacatcataaagcctgaagaattgaggacttatgcgaatggagaaaaaatttcctgctctcctacagaccgttatgcggaattgaagaatttgttggacaatgactatactactgcttgggaaacgacttcgcagtcgactccccgtaattacagtatgtcgatggaattgttgaaggaaacggaaatcagtggagtcaggataaaccaagttctttaccatccgatgtctgacagacgtgctccgttttttatgccttcccagatacacattcaagtatctacagatggaggtaattggcaaaatgtgaccttttttgaatccaatgaacttggacgtggttccggtgaaaccaccttgttgaaatttcccgagggtccaagaaaagtgagatacatcaagtttacattgcgtgacggtacggatcagggaggaaattgtatgattatattgggagatatagttctttataaaaataaataattaatcgtgatatgtttaaacatagttatttgctaaagtcttttatttgcgggatattgctactgtgcttctcggatatattcggacaggaggaaaaagaccggcttttgcaactgatgaagcaggagttgaaatacagtatggaggaacttaaaaagcaggagtatgctccatattatatgaatatgagggcgatggatgattatacgattacagtggaaagttcattcggtgcagttgcgatgtcaaggtctaacaggatgcgtactttggtgtcgcaaatacgcttgggaagtccggagctggataatttcaaatacaatacgcaagggggcatgtatggccctcatgcgcaaggtgctcaaggcgttattcttccgttggatgatgatgaagatgcaatcagggaggctatatggagagaggttttaatgcgttacgagtttgcgagaaacatgtacgaacaggtaaaaacacgggctagtgtaagtgttgccgatgaggataaagctccatgtttttcaaaagctcccgtagagcattattatgaggctcctttggctgccggaatgcagaagatggatataaaaagggattgggaatatagactgaatgcggtttctgccgtattcaagtcttgtccggacttgcgtgagggaaatgccagcttcagttttcaggtgttgagaacatattttgtgaacagcgaaggaagtgtcgttgtacaaaaccgagttgcaacacgggtaatgttgtctgcctccctgaaagcggcagacggaatggaacttcctttgaatattgattattttgcatatactccggacgaattgccggatgaggaaaaaatgatatctgatgcgaaagatatgattcagaggttgctggcattaaaagatgctcctatagcggatccttataccgggccggcaatcttgtccggtcctgccagcggtgtcttttttcatgaaatttttggacaccggctggagggacaccgtttgaaaaccggcggacagacatttaagaaaatggtgggtgagcaggtgttgcctacagaattccaggtttattgtgacccgctgttaaaagaatatgctggtacagaattatacggccattatatgtatgacgatgaaggtgtaaaagctcgtcgggtagataatgtggttgatggcaggttgaaggagtttttgatgagtcgtgttcctttggatggttttcctgtaagtaatggtcatggacgtacttcaggtggaggggatccggtatcaagacaatccaacctgattattgaaaccacccgtccgtatacagatgaggaacttaaggccatgttaaaggaagaggccaagaaacagggaaaagaatacggttattttttcagaacggtgacaagcggatttacttatacaggagaaggaggaagtttgaattcgtttaatgtgactccgttggaggtgtatcgtgtttttgtggacggtcgtcctgatcaattggtacgcggagtagatatgataggcactcctttgtcaatgttttccagcattgcagcagcaggagataaaccgagtgtttttacgggagtatgcggtgcagaatcaggatgggtgcctgttacagcatcctctccgatgatatttgtaagccagatagaaacgcaacggcgtgctcaagaacgcgatattgctccgattttacccgctcctcaattgggtgaagtatccacaaaagaacctgacgatattatttttgcggcaatgcaggcagagcaagaacgtaataaagcgaatctggttcttgccaatagtttgcgaccttattatatttcctatgttgtagcacgttatcgtcagttccagatggtggcatcgttgggaggcttgatgcagtctaacgtgttcccttggcaaatgagtgggggaactcagattttagtcggcgattatcaaaggaacagcgatgtacagtatgaagagcagatagaccttgttcaattgccgtctgaagtgaattatgatgtgattcgtcgcaggttgtgggaatcttctgatgtgatgtttaagtatgctttgggtgcgatggcacagaaaatgaactatctgcaacaaaatccgcttcctgcaaacgaacttgctttggcggatatgcaacagctccctgcggtttcttcaatacaaaaacgtgaggtggaatataaaatcgaccaggcttatctggagcaattggttaaggagttgtcggctgtttttaaagactacgatgatatttataattccagtgtaagtattggcggtatggaaatagatatgtatcgccagacaacggaaggtgtcaagctgaaagagccgggaggaactgtaaatcttaccgtttcagcagaaatccgtacaaaggacggtgttaatctgggagattcgttctctcttgttttgctgaatccttctgaattgccttccatggaggaactaaaggaaagggtgataaaatttgcagaggatttaaggcaattgagcgcagcttctcctgtagcggaatattataacggaccgattttgtttgagggtggtgctgcagcaagtatatttgcaaataatcttctttatcgtggagggttgattgcggctcgttcgttggctccggcaagaggtggcttagctgatcaatttggtcgtaaaatattggatgaacgtctgacgattaaaaattatactgctttgaaagagtataacggaatacctttgtacggacattataccatcgatggggatggagttgctccggaatcggaaacagtattagtggaaaacggagtatttaaaaagatgttgaatggtcgcatacctactttacatgcgccttctacaaccggtagttctcgttttttgatgtcgccgcagagtcctacgttagtaacagccacaggtacggttcatgtgcaggcagagcagactgtcgcttatgaaaagatgaagaaaatgttgataaaatctgctaaaaaagcaggtctgcccgttgcatacattgtgagaggcgaattgggggcatcaattgcgatttatcaggtgaatttgaaggatggaaaagagactcttgtccgtacaacaggattcaagatgccggctttgtccaatttgttgaaattgtcggctatatcttctgaagagacggtatttaactatttcccaaataattatccggcatccatgatatgtccttccggtgtaattattgatggtatggttatagacaaggcttctgtaaagattgaaaaggctccggcattgaaacttcccagacaacgataaatgaatatgaaatgacggaaaatgtttacatgttttccgtcatttccataaacttaaaaataatgataagatgaaaagatttttattgacactatgtgtatggttggcttgtactgtattggttgtagcacagaatgatacttttacaatagaagggcatctggatgcatcaatcaatggaaaattacttttggttgtggatgcagaaaaaggtttgattgatattggggatgctgtggttacaaacggagtcttcaaatttaccggtcggatgccggaagctacaatggcttatatcatgccggtgaagaaagatgttgtattaggaagttttatgttggaaaatgccaactatactattgagatgggaatgaatgagctggtggtgaacggtggaggagaggcacagaaaatatggaatgagttcgtagcgttggataaacagattatcgcaaatcagcaggaattggagatgcaggctcaggctaatccggcgttggtaaagtcattgcagcagaaatttgacaaatttgtagccggaatacaggaaaaggaagtcgagttgcttaaaaagcatagtaatacaattgtggccgcctatgtggtatcagccaaaatttccatggggcttgatgaggttaaactgaaggcattgtatgatttgttaggagaaaacgccaagtctacattttatggaaaacgggttgcggatgaattggcgagggtgcaaaaaatagcaatcggagcaatcgcgcctaattttacagctccgttggcagatggaggagttctttctttgcatgaaacaaaaggaaaggtgaagattgtagatttctgggcatcctggtgtgctccttgtcgtcaggaaaatgtgaatttgattcagatatataaacgttttcgtccgaaaggattggaaattatcagtgtatctcttgacaataacaaacagaattggttgacagctatagggcaggatgggtgcgaatggaaaaacgtatctgacttgaaaggagaacattctgaaattgcagcagaatattgtgtaaaagggattccttgcacttttatcttagacgaggaaaatagaattatcgctaaaaatttgcgaggcaaagaattggagaaatttgtagaatctcttttgaagaagaaaaaaaattaactattttatctaactattaaattgaatgatgtgtgatgttttttctcttctgtaaattaagtatgaagaagggataaattgttaactgtgtcattgtttgttattaatgttaatagctatgatgaataaagtattttcgtatttattattgatgcttttatttacgtcatgtgcctcattgaggcatgatcgtatggaagaagtattggcaacggcagtcatggaaaaaatagacagtcgtaattatacgatagatgtatttcctgtgtttgcctataagtctttgtctgctgaatttttacatgcatatattcaggtgagtggggatactttgatcgcttttactaagagtgagatacctgttgatgagtctggaaattatccgaatgattttgtaaagcagatgcctcggtataaaatttatgattacaagcaggtagaaggtcggaaaggtagtattgaagttagttttaggtttgattggttgtattctggaaataatgcacaggtgtcagctctttaccctgaaaacttgatacctgtacggtataagtttgtggttgaacgctctggtaatgtccgtatctatagagatcacagtgctttttgggggcgggtaaggttgtaaagtatatttaaaatttgattgattcttgttctgccccgaaaatcattatcgattttcggggcttttggtggatatattcttgtaagtaattatggttatttagttgaattgttttatttttgcaataaatattcagatagtcatggaaaaggaaagatacattcatttcgactgggcgatgaagcggatgcttcgtgacaaggctaatttcagcgtgctggaggggttgttgacggtgttgctgaacgagaagattacaattgtggagctgctggagagcgaaagcaatcagctggcattggacgataagttcaatcgggtagatatcaaggcaaaggacagcaagggggagattattatcattgaggtgcagaatacccgagagatttattatctggagcgtatactatatggcgtggcaaaggcggtgacggagcatatttctttgggtagctcctatcaggaggtgaagaaggtgatttcaatcagcatcctttattttgatatcggtcagggacgcgactatttgtatcatggttattcccgctttgtaggcgtgcatacgcatgatgagttgctggtgacttccagggagcgtgatgccatcgtccgcaaatcccccaaggagatatttccggagtattatctgatacgtgtgaatgagtttaatcaggttgcccgtacgcccttggaggagtggatttcttatttgaaaacaggggaaatcagtgaggacgcttcagcacccggtttgccggaggcgcgagaacggttgcgttattatgatatgaagccggcagaacgtcatgcttatgatgagcatatcaatgcggtgatgattcagaatgatgtgttggatgcagcgaagattgagggtagagcagagggtcgtgcagaaggtagggcagaaggtagggcagaaggtagggcagaaggacgagtagaaggtagagcagagggaatgcgagaaatggctcgtaaattaaaagaagcaggtgtgatcgttgagataattgctgcaacttcaggacttacagaaagtgaaataaatgcactgtagttttataggcataccaagggtaaactggaatggtattgttttaccggttcaaatagggcacgcttggaaatcatactatatagcagttattgttctatttttgtttaaaatattcagatagtcatggacaaggaaagatacattcattttgactgggcgatgaagcggatgcttcgtgacaaggctaatttcagcgtgctggaggggttgttgacggtgttgctgaacgagaagattacaattgtggagctgctggagagcgaaagcaatcagctggcattggacgataagttcaatcgggtagatatcaaggcaaaggacagcaagggggagattattatcattgaggtgcagaatacccgggagatttattatctggagcgtatattatatggagtggcaaaggcagtgacggagcatatttctttgggtagctcttatcaggaggtgaagaaggtgatttcaatcagcatcctttattttgatatcggccagggacgcgactatttgtatcatggttattcccgctttgtgggcgtgcatacgcatgatgagttgttggtgacttccagggagcgtgatgccattgttcgcaaatcccccaaggagatatttccggagtattatctgatacgtgtgaatgagtttaatcaggttgcccgtacgcccttggaggagtggatttcttatttgaaaacaggggaaatcagtgaggacgcttcagcacccggtttgccggaggcgcgagaacggttgcgttattatgatatgaagccggcagaacgtcatgcttatgacgagcatatcaatgcggtgatgattcagaatgatgtgttggatactgcgaagatcgagggtcgtgcagagggtagggcagaaggtagggcagaaggtagggcagaaggtagagcagaagagaaaaagcaaaatgcacgtaatttgaaaaatttgggagttgcgatagaggtcatatctcaggctacaggattgacagaacatgagattaaagaactctaattaaaatagtgttcatttgacttttggcatatttttgattatcagcatattgcgaaaaactttaaaattttcatgaaaaaagtggtcaaaaaatttggaaataggtaataaaagggtgtatctttgcacccgcaatcaggaaatgacacctaaagcaatagaggaggtaagaggggttgaagaattgatttacagacagtttctgatggcaatagttcttcaggatggtgtaaggcgaaaggcttcgaaaaaaaacttcaaaaaaaaactttgcaaaaagtttggaagttaaaaacaaaagcattacttttgcacccgctttcaaaacgaaagacttcaaattggttctgagattttgaaaacaagttctgaaaaaaaagatgcgaaaaaatttggaggtatcaaacaaaactccttatctttgcatccgctttcgctcctaaaaatgagcgacagacaaacaagaaagagatagttctttaagatattgaaaggtttgaaaaacagcaagtgcgagtccgaggaataaattccgagggataatgactgggctaaagagaaaataatttaaagtttttattactatgaagagtttgatcctggctcaggatgaacgctagcgacaggcttaacacatgcaagtcgaggggcagcattgtaattagcttgctaattacagatggcgaccggcgcacgggtgagtaacgcgtatggaacctgccctttacagggggatagcccatggaaacgtggattaaaatcccataatactttattcaggcatctggatggagttaaatctacggaggtaaaggatggccatgcgtcctattagctggttggcggggtaacggcccaccaaggcgatgataggtaggggttctgagaggaaggtcccccacattggaactgagacacggtccaaactcctacgggaggcagcagtgaggaatattggtcaatggccggaaggctgaaccagccaagtcgcgtgagggaagactgccctatgggttgtaaacctcttttattcgggaagaataagtttcacgagtgggacgatgcctgtaccgaatgaataagcatcggctaactccgtgccagcagccgcggtaatacggaggatgcgagcgttatccggatttattgggtttaaagggtgcgtaggcggttgattaagttagtggtaaaatgtcatggctaaaccttggccagccattaatactggtcagcttgagtacagacgaggtaggcggaataagttaagtagcggtgaaatgcttagatataacttagaactccgatagcgaaggcagcttaccagactgtgactgacgctgaagcacgagagcgtgggtagcgaacaggattagataccctggtagtccacgccgtaaacgatgctcactggttctgtgcgacatacagtacgggattaagcgaaagtattaagtgagccacctggggagtacgtcggcaacgatgaaactcaaaggaattgacgggggcccgcacaagcggaggaacatgtggtttaattcgatgatacgcgaggaaccttacctgggtttaaatggagatggacgtaacaggaaacagttattctcttcggagctattttcaaggtgctgcatggttgtcgtcagctcgtgccgtgaggtgtcgggttaagtcccataacgagcgcaacccttaccgttagttgccatcagtgatgctgggcactctggcgggactgccaccgtaaggtgagaggaaggcggggatgacgtcaaatcagcacggcccttacacccagggctacacacgtgttacaatggccggtacagagggcagctacccagcgatgggatgcgaatctcgaaagccggtcgtagttcggattggagtctgtaacccgactccatgaagttggattcgctagtaatcgcgcatcagccatggcgcggtgaatacgttcccgggccttgtacacaccgcccgtcaagccatggaagccgggggtgcctgaagtccgtaaccgcgaggatcggcctagggcaaaactggtaactggggctaagtcgtaacaaggtagccgtaccggaaggtgcggctggaacacctcctttctggagtaccggttattatgaatcgtacttgctggaacaaatctttgaaaataaatgcggggcatttaacccagtctcttagctcagttggttagagcgctacactgataatgtagaggtccgcggttcaactccgcgagggactacacctgggggattagctcagttggctagagcgcctgctttgcacgcaggaggtcaagggttcgactcccttattctccacccagtaccgttaggggtacgcagttctttgacattttggaaagaaacgattagaatataatccacaacagattgtgcatatgtaagtatgtacaacgagcaacgagataagtaatagtcgaaagactgtgaataacgagtaagcatgaattaaagtaaataagcaagggcgtatggtggatgccttggctctcagaggcgatgaaggacgtgataagctgcgataagccgcgtataggtgcaaataaccgttgacgcgcggatttccgaatgggataacccaatacattgaagatgtattataccgtaaggtaggcaaacgcagggaactgaaacatctaagtacctgtaggagaagaaaacaaacgtgattcccccagtagtggcgagcgaccggggaacagcccaaaccgttgatgtttcggcatcagcggggtaataggaccacgttattgtcaaaataatagaagtggaacgtactggaaagtgcggcaatatagggtgacagccccgtacacgtaatattatgcggcatagtggtatcctgagtaagtcgggacacgaggaatcctgaccgaattgaccgggaccatccggtaaggctaaatactcctgagagaccgatagtgaacaagtactgtgaaggaaaggtgaaaagcacttcgaacagaagagtgaaatagtccctgaacccatacgcttacaagctgtcggagcccctttgtggggtgacggcgtgccttttgcataatgagcctacgagttactcgtcactggcgaggttaagcacttcaggtgcgtaagccgaagcgaaagcgagtctgaatagggcgtgaagtcagtggcggtagacgcgaaaccttagtgatctacccatgagcaggctgaaggtttggtaacacaaactggagggccgaaccggtaaacgttgaaaagttttcggatgacttgtgggtaggggtgaaaggccaatcaaactgggaaatagctcgtactctccgaaatgcatttaggtgcagcctctgttgttttgtcttcgaggtagagctactgattggatgcgagggcttcaccgcctatcaaatccggccaaactccgaatgcgaagacatgaagacagggagtgagcccgtgggtgctaaggtccacggacgaaagaggaagaactcagaccatcagctaaggtccccaattgtatgctaagttgagaaaacgcggtgggactgcttagacagctaggatgttggcttggaagcagccattcatttaaagagtgcgtaacagctcactagtcgagcggtcctgcatggataatacgcgggcataagtatacaaccgaagctatgggatgtatgtataatacatcggtaggagagcattccattcggcttagaagccgtatcgtgaggtatggtggagcgtatggaaaagcaaatgtaggcataagtaacgataatggaggtgagaaccctccacgccgaaagatcaaggattccccggcaatgtcaatcacccgggggtaagtcggaacctaaggttcaaccgaacggtgacaccgatggcaaacaggttaatattcctgtactaatcataactgcgatgcagtgacgtagagatgacactactgccacctgacggaataggtggttgaagcccgtacccagagatagatatagtgaagtacgtatctagaggtgaaaggtgatagtatcgtaaggcttcggctgcgcgaataatgtaggtaaattaactaccaagaaaacctgctaagcttcaggttatgattatccgtactgtaaacggacacacgtgatcgggtagaagatactcaggcgctcgagagattcatggttaaggaactaggcaaaatggccctgtaacttcgggataaagggcgctctagcaatagagccgcagataataggcccaggcgactgtttaccaaaaacacatggctatgctaaatcgcaagatgatgtatatggcctgacacctgcccggtgctggaaggttaagaggagagctcagtagcaatacgaaggtttgaattgaagccccagtaaacggcggccgtaactataacggtcctaaggtagcgaaattccttgtcgggtaagttccgacctgcacgaatggtgtaacgatctgggtactgtctcaaccatgagctcggtgaaattgtagttccggtgaagatgccggatacccgcaacgggacggaaagaccccgtgaacctttactgcagctttgcattgattttgggtaatagatgtgtaggataggtcggaggctgagagatggtgtcgtcaggcattatggagccgtcgttgaaatacgacccttctgttatctgaggtctaatcccgttagggagacattgcatggtgggtagtttgactggggtggtcgcctccaaaagagtaacggaggcttctcaaggtgccctcaagacgtttggtaatcgtctgtagagtgcaatggcataagggtgcttgactgcgagactgacaagtcgaccaggtaggaaactagagcatagtgatccggtggttccgcatggaagggccatcgctcaaaggataaaaggtactccggggataacaggctgatcgctcccaagagctcatatcgacggagcggtttggcacctcgatgtcggctcgtcacatcctggggctggagaaggtcccaagggttcggctgttcgccgattaaagtggcacgcgagctgggttcagaacgtcgtgagacagttcggtccctatctgttgtgggcgcaggatatttgaggagctctgactctagtacgagaggaccgggttggacatacctctggtgaatcagttgtgtcgccagatgcactgctgagtagctatgtatggattggataagcgctgaaagcatctaagcgcgaagccagcttcaagattagatatccttacagggtcgttgtagatgacaacgtcgataggttgcaggtgtacagtcagtgatggcatagccgagcaatactaatcacccgaaagtttactttaagtggagtatattttagttggtttctttctggaaaggtcaaaatggcgaggtagctcagctggttagagcgcatgattcataatcatgaggtcggcggttcaagcccgcctctcgctacaaacgttaagattacagagcaagagtgctcatggtgcgtaatcagaaaatattaaaaggtgtctataaccgaggggatccacctcttcccattccgaacagagaagttaagcccttgagtgccgatggtactgccgaaaggtgggagagtaggttggcgccgaatttcaagagagagttactacaacgtgactctctcttttttcttgttctatgctttgtatctacttttctctttcgctatctttgcactattatttggattttatgaatcatggaacttaatcctcaaattgcacttgctttcgattatttggagtttactgggactagtgttttccttacagggaaggcgggtactggtaagacgacctttctaaaggaacttaagaaaaagtctcccaagagaatggtggtagtggctccgaccggtgtcgctgcaatcaatgcgggtggtgttactattcattccttttttcagcttccttttggaccctatttgcctcatttatcagaaaatgatgagagtaagaggcttactaaagcgttgaataaagagaaggtcaatattatccgtagtttggatttgctggtgattgatgaaatcagtatggtaagagcggatttgctggatgccgttgatgctatgttgcggcgttataaagatagcacacggccttttggtggcgtacagctgttgttgataggtgatttacagcagttggctcctgttgttaaggatgaagaatgggggttattgaggcaatcttattattcgccttttttctttgctagtaaggctctggcagagttgccgtatgtatgtatagaattgacacatgtttatcgtcagtctgacgaatgttttatcagtcttttaaataaaatacgaagcaattctattgatgctgcttctttagcgatgttgaataaacgctgcttgacgaatgcggataccttgtctgatgggtatattattctgacaactcacaattacaaagctcaggatatcaatcagaaaaaacttgatgagctgaagtcggagccatttgtttatgatgcggaggtaaaggatgattttccggattattctttccctactgatcggcagttggtattgaagaagggagctcaggtgatgtttataaaaaatgattcttcttcagcaaaggaatatttcaatggtaaaataggttgcattacaggtattgctaaggataaaattatcgttcagtgtaaaggtgatactggaacgattgttgttgggaaagaagaatggactaatgttaagtatagtattgatcctgaaactgaagatattgtcgaaacggttgctggagtattcaggcagtatcctttgaggacagcttgggcaattactgttcataagagtcagggtttgacttttgataaggctgttgtcgatgttagttctgcttttgcccatggtcaagtgtatgtagctttaagtaggtgtaagtctttggaagggttggttttgagtgctccgctgcagaaaaatgttttgattagtgattccagtatagccagatatgttagtgaacaacgtaataaccagcctggtcagcaggagttgaatgatgctcggttagtatattatgtgcaattattgcaggaattgtttgatttttcttccgtgttgaagagggtgcagcatttggctcgtttgtttagcgagcatttgtggcgtctttatcctgaaatgtcagaaaatgtaaagaaggtacgtgaaatttgttttcatgatttggtgcaggtgggactgcgattccaacatcagttgcagcatatagtctcggaatctgaatgttatcaggaagatattttgctgaaggaaagaattggtaaaggggttaattattttaatgctttgattgaagagcatcttgtcaagttgataaatggttctttgcctgaaattgataataaggaggtgaaaaaatccatagctgatgcttgggctaagttatcccaggaagtttcggtaaagagggctgtactgaagtgtgcagctaatggttttgatgtacatacttatttgcagacgcgttcaaaagctttgattgaaaaagtggagcctaagcggaaggaaactgaaaaagttcaggttggcgaagatattttgaatcctgaattgtatgagaagttgagagtgtggagaaaagaagaagctaaaaaaatgggagttccggcttatgctgtattgcagcagaaagcgttgataggtattgccaatacgattccgagcagtggaaaggaattatttagagtacctggtgtcggtaaaaaagtattggaacgttatggctcgcaaatcatggaaattttagatcactatcgattttatatgaagtgatggtatttttattacttttgcataaaagaaattgtttatggagaatcagccgttagcagaacgtttgagacctaaatcattggatgattatattggacagcagcatttggtaggaaagggaaaggtgttgcgcaagatgatagagtcgggtgtcgtttcttcgtttattttatggggccctccgggggttggaaaaacgaccttggctatgattatagcggaacaattgaatcgtcctttttatgtgttgagtgccgtaagttcaggggttaaagatgtgagggaggtgatacaaaaagcagaaaaccagcgtttttttaatactcctaatcctattttatttattgatgagattcatcgtttttcaaaagctcaacaagattcattattggcagctgttgaaaaaggtacggtgacattgataggtgcgacaactgaaaatccttcgtttgaagtgatttcgcccttattgtctcggtgtcaggtatatgtgttgaaagcccaagagaaagcggatttggaaagtttggtggatagagcggtaactaaggatttttatctgaaagaaaaaaatattatagtcaaagaaaaggaagcactgatctcatatagtggtggagatgcacgaaagctgttgaatatattggagctggttgttaatgctcaggccggaccggaaattgttataaacaatgatattgtgcgtaaagaattgcaggaaaatcctttgatgtatgacaaagatggtgagcagcattatgatattatttctgcaatgataaaatctattcgtggaagtgaccctaatgctgctttatattatatggcacgtatgttggaagggggagaagatcctaaattcattgcccgacgtttgttgatttctgcttctgaggatattggtttggcaaatcctaatgcaatgttgctggctaatgcctgttttgatacggtgcataaaatcgggatgcctgaagcccgtatacctttatctgaatgtgtaatttacctagcaacttcacccaagagtaattctgcctatatggcaattaatgaggcgatggatttggtgcgtaaaacaggaaatattgcagtgcctctttatttgcgtaatgctcctacaaagttgatgaaggagctgaattacggtaaggattataagtatgctcatgattatccgggaaattttgtagaaatggagtttatgcctgaggatttgaaaaatgtggtattgtatcggccacagaataatgcagcagaaatcaagatttgggaacgcctgaagggttggtggaaaaaatacagaaattaaaattaatagtatatatgaaaatcttaaatgaaataactgataaagatatgtttttcctgcttgcaggaccttgtgtgattgaaggtgaaaaaatggctttggatatagcggagcatgtttccgaattgacagataagttgggaataccttatatttttaaagggtcttttaaaaaagcaaaccggtcacgtttagattcatttaccggtattggagacgagaaggcattgaaaatactggcaaaaattcggaatgattttcagattcctgtagtgacggatatccatagtccggaggatgctgtgatggcggccgaatatgtggatgtattgcaaattcctgcttttttatgtcgtcagacagatttgttagttgctgctgctcgtaccggcaagatggtgaatattaaaaagggacagtttctttctcctgatgcaatgcattttgcagtggaaaaagtaagagagtccggtaatgataatgtaatggctacagaacgtggaacaacttttggctaccaggatttggtggtggattttcgaggaattaagattatgcagcagacttgccattgtcctgttgttgtggatgtgacacattctttgcagcagccgaatcaagcaggaggagtaacagggggacaaccggaattaatagagacaatagcgaaagctggtattgccgttggagctgatggattgtttattgaaacacatcccgacccttctgtagcaaaatccgacggagccaatatgttacgtctggatttgctcgaaggtctgttgaataagctggtgcgtatccgtcaagctattcgggaatagtttgatattataatgatttggcggggtcagatatctagttggacaactgtgataccggctccgcctagttgtacttgttcgtcggcataggtagcaaccacgggatttgtgctcaggtactgtcggataagttgtcggagagcgccggtaccggtgccgtgcagtatccttacatctctatagccaagcatgattgcttcgtccaagaaagaaattacccgctgcagggcttcatctccgcgcatgcctcttaaatcaatgtctggtttaaaggtcatgcgtttttgactgatattttcccggatattggcataggaggcttgtatttgtggacgggctatgcgttttgcttgtgttgcagaggctttttggagttgtgagacttttactttagtatgtaattgtcctagtgcaactactgcatttttgtcatcaatttctaatatttcgccaatggcattattcgggagttttacataatcgcctttttgaaaaatgggagctgcttctttgtgttggggtgaagtttccggttgattttgttttttttcttttctattcttttcccggtttttcaatttttccatttttttgcggatacgctcttcttcttcgttttgttcttcagaaagtaagcgttgtttctcttcttccatgcggcggcggatttcccgggttttttctttcttggcttgattttcgcggatttcccgaatagttttttcaacagcagcatttgcatctgctatgatttcctgggctttttgttgtgcttcgcgtatgatttctttacgaattcgggaagcttcgcttagttcattgctatatttttcaacgacttcatctaagcgtttctcattttcgtggattttacggcgtttttcttcccagtagcgtttgtcgcgggcaatgtctttcaggtgtttgtcatagttaatatgatcttctcctacttttgcggctgcatcctctaggatctccttgggaagtccgattttttttgcaatttcaaaagcaaatgatgaacctggtttaccgattttcaattcaaagagcggcaacatccggtgattatcatatagcatggcgccattggctatcccaggtgtttctgccgccaggtgtttcaagttggtgtagtgtgttgtaataactcctctgactttgtctcgattaagtgcagagagtatagcctcggctatagctcctcccagcatgggctctgtacctgtgccgaattcgtcaatcagtactaatgtgtcgtcactgccgtatcgcaggaagtttttcatattaatcaagtgggagctataggtactcaagtcgttttcaatagattgttcatctcctatgtcaatgagtatttttccaaatattccgaatttgctggcttcactgacgggaacaggaagaccgcattgaaacatgtattgcaacagaccggcagtttgtaaacagactgattttcctccggcattggggccggatattagaatgatacgttgctcgtcatagacttctatatttaagggtatcagtttcttgtcggtgttttttaggctcagccataaaagagggtggcgggcctgataccagaacatttcagcattgtcattgaaggctggtacgacagcttctatatagttggaaaatgcagctttccctcgaataaaatcaatataggcgaggaaatcatagcctggaagtaaatcatcaatataaggacgcagttcgtcagcgaattttcttagtattctcatgatttcgcgtttttcttccaattcaagttcgcgaatttcattattggtttcaacgatttctgccggttctatataggatgttttaccggttgctgattcgtcatggacaattccgttaattttacgtttgtatgctgatggaacgggtatcaccatgcgtccgtctcggatggcaatcgcactttctttatctgcccatccttcgctttgagcctgttgtaacaggctttgcatgcgttttgaaatccctgcttgtttacgttgcagacgatgtcgtatgtcgtttaattcgggcgatgctgtatctttgattgtgccgtgtttggaaactattgtatccaaacgttgttgtacgaatgggaataaatgtatacatccggctttagcagagagaatggggtaacgctcttctttacctttgaagaagcgcacaatagcactgagagactccagggataatttgagtgcaaccatttctgctatttctagaaataatccttcaactctgattttttgcagaaaagggcgggcatctctgaagtggtctccagggaaagagtcttccacctgcaggatgttcatgaattcatgagtttctttcagttgttcgcttatataagaggaatctgatgaaaaattcattttgtccaccaattctcgtcccatatcactcaggcaatagcttttaaccaattgtctgattttatcaaatttgattttactttcgaaattttccggataaatcatatccttatttttaaagagattatctgaccttaatattgcctctgattcttagggttgtttcaggatgcttggggtcgttggtaattactgtgatggttttatattgttttccgcttctgcctgtagagtcgaacgtggcacggattgtagtcgatttgccaggttgtacagccttattgccaatagttactgccgtgcaaccgcaactggctttagttttgcggataaacaaaggtctttttcctgcattttttacgataaaatcgcaatgagctttttcgccttgtataatttctccgaagctaatttctttggctgtaaattccacagtaggagcattggctaattcttgatctgtaagtttgctgaaatcttctgtaatgttggctgttatggtgatacgattcctaaaatcttttgttccatttaccgacaacatgatattatcataattatatccgtagtcgtttcttttgggagcatcaaaagttacaatcatggctccacgttggttgggggctacgactgaggggtgaaaattgaagtgtaaataagttggtttgttcagaggttcgatatgtatcggctcttttcgtgtgtttagataataaattgtatcggttattttttgccaggtatagatatctccaaaactgatgttagatgctctgaattttattcctgctaatgtatatttgtacagtaatgtaggtttggcaggattgtctgtgacattgccagtaagcctgagttctgtacctttgttgctgagatttgtgtataccatgattttatagtcgaaacgttcttgaaaatgcgaagaggtaaaggttacttgaattttaccatttttccccggagcaatcggttctcgactccactttgtttgtacctgagcgctcatagaggtggcacgggtaatgataaagggcttgttgcctgtatttttaatttcaaatatttttgtctgtggctgatcgtttgccagtaaatttttgaggacaagtgtcggctgttttacttccataattccttgagagaatccagaagttatagtcaacacacaaaaaaatgtcagtaacaatgatttcatatgtgtttattttatctgtccgtttattttatagagtgtcaccggattttcaggatcatttgttgtaaattgtatgagttttgtgatttgtcctttagctggggtattgaaagttacggatacctttatttttttacctggttttatactatgcttgcctaaatgaatgtgtacatcttcttcggaacctttcactttgcggaatatcaaatccgatttaccattattttggataaagaatgtatgggtcgttttgctgtttgaaggtaggtttttgaggttagctgtttcatttggaagttgaattgcaggtgctttatcataatttccttcataaaaatcaaaatcttcgttgatatttgcagtgaaagtgaataccccttgtattgtatcgttgatattgatattgattttatcagaaacatagccccaatcattttttagtccggcattataggtgaagattatctctcctttttctccatgtttcaacgtattaggtgttatgatagctttgatgtggggggaggtgttgctgactgtgattttggcaggctcttttccgctatgtatcatttgaattttatgttcaatctgttgagtattcataatatcatcaagatcagcctttaattgagtgaattttacttccccaatagaatagtcgtacccttcgtaaggacctgcaggttgatgttgaactttgccgcggatggttagcgtgacaacattgttgctggcgtttgaattgacagcaatgctttttacaaagtttccaggtctgttgcgtgggtcaaaatagacacgtatggtgccgttggctccaggttctacgggtttcttgctccactccggcactgcacaaccgcagcctgtccttacattggttaatactaatggtgatttgcccgtatttttgaagataaaatcatatacaacctttcctccttgttccggtatgacaccaaattgatgagaggtttttgtaaattcaatttttgctttttgggcaaatatgaaagtaggaagtatgattaataataaaaaaaacaatcttttcatttggcgttaatttgtatttttggaattcatgcaaaagtaagaaagaatttgcgaaacaacgttggtatgatattatttatatgaaaaaaatatgtttggattgaatcatatttgtatatctttaccaactctaacggaaaatgatgatatgatgtcgttatataaaaaggataaaaagataagcaatgaagtgatgttaacattacaggatttgtttgtagaatattatcctgcattgaaatcatttgctgttcgttatgtaaatagtccggaagttgctgaagatttggtgcaagatgtttttttacgcttgtgggagaatggagagttattgaatgatgtagaagaaaagtcggcatacctttatcagatggtacgtttcaagtcaatagattatttacgtcataaaaaatatagcgagaaaagtgtagaagaatatgctgccgagttaagccaagtagacgattctgcctatttggaggaagaaatttatcgccggatgatgatggctattgatacattacccaagggagtacattctgtgcttactttaactttggaggggcgttctgctaaggaagttgccgaacaattgaatatatctgtagaaacagtcaaaaaacagaagcaaatagcacgtaaaatgttgcgtgataaattattgtctttgttattattgcttctgaattaaatccttatctgtaaaaaatagcgtttgcttgattttttttgaaaattatatacctcttttgaggggtgtgtacgtcatatctatgtaaatgatgaaacaatgaaaaagtttgatgaatattcaaaaattgtagacttgcttgtacgttcattacaaggagatatttctgcggatgaacagacattaataaatgcttggagaaaagataatccagctaatgaagctatgtatcatagaattctaagcgatgatttttggaagagacatccgcagcagcaataccaaggtgaaattgtaacggcttggatgcgtttgtatgaacgtcggctgagacaggaatcacgtttgcgtttgcgtagaaggttgagagctgttgctgccgtggcagtacttgttgttggatgttcggctttatggcagataattcaatggcagaggggtgatggaagaagtccaagttatactgtgcaggaaaccggaaataataacaaggtgaagctggtattgagtaatggagctaccgtttatttaggcgaaaaaactgatttaaggaatgtggacgaagagggtgctgttattcaggcaaaaaaggatgctgtacattatgtgaataaagaagttgggggagaggtgaagtataatacgcttagagtgccacgaggagctgaatatgagttgatattggcagatggaacttcagtgtggttgaatgccgagagtgaaataacttatcctgtttcctttaaagaagataggcgtgaagtgagtttaaaaggtgaagcgtattttgatgtagctaaagatgcagaacatccgtttgttgtacatataaatgattttgatgtacgggtgactgggacaaaatttaatgtccgtagctatgccgatgtgccatcttcaacaactttggctgaaggaggtgtgcagttggaacagcaaggtaaagtggttgttttgcagcccggacaacaggcagctttgattgatggagaaatagaggtgaaagaagttgatttggaggaggccattgcatggagatacaatgcattttgttttaaacaccagtcattggagagtttgttgaatgaattgtcccgttggtataatctggaaatattttatatgagtccctctctaaaagatttgcattttacagcatggttctcgcgtagcagtagtatagaggaggttattaaaaaattagagcgaacacaaaaaattcgtttggagttaaaagatagaacattaatagtaaaatcaaataaataattaaagatcaaaagtaaccaataaaacaaaattaaaaaacgaaatgccggaatgtacgccaatacactccggcaggaattccctcctgtcaagggaaagattgtcaaacattagcaacaaaattatgaaaaaaacaattcaaacactaatctggatcatgattaaaatgaaacttatgtttctggtgattacattggcgtgtactagtctgaatgcagcagtgtggtctcaggaaaagacgattgatctccagttgggagaggttaatttggaaacgctttttgagcaaatgcagcagcgtactcatttgcgctttatctttaaccatgaagatgtgcaggggtacaccgtaaatgctaatctgaaaggaaaaaccatagcagagattttggacaaagctcttgctgataagcctttgaagtatgaaattatggacggacatattgttatttctcctaaaagattggagcaaaatcagcaaccggaaatgattgttatcaagggtaaggtgacggataaatctgggcatccgatgccgggagttactgttatgttaaaaggtaccacttttggtgcagcgacagatgtcgatggaaaatatgagatgacgatacagaaaaagtatgccaccattttggtattttcttttgtcgggatgaagactcaggaagttgctattaatggcaaaacggaaattaatgtgaaactggaagatgatgcaaaagaaatagaagaggttgtggtgacaggtattttcaaaaaatcacgagagagttatacaggttctgtcactactatcagcaataaggaattgaaaatgtttaagggacagaatcttttatcgacattgaataatatagatccggcatttaatattgttgccaataatacattaggcagcaatccgaatgctttgccggaaattaatatccgtggtaattcttctttgccgatgtcaatggaagaattgaataatcaaacagcccagcgtttgaatcagccgcttattattatggatggctttgaaataactttagagaaattgatggactttaatgacgaagatgttgagagtattaatatattgaaagatgcatcggctactgctatttacggatcaagaggtgctaatggggtgatagtagtaactaccaaaaaacctgaagccggtaaattgcagataacggcaaaagcgggatttagtttggaaatgccggatttgtcttcttataatttgttgcatgctgatgaaaagttagcattggaaaaggaagtcggtttatatgatggaaaagaaggcgacccgcatgatatacagaaaatggaagagatgtattatgcaaccttgaaagatgtaattaggggtgttgatacttattggttatcagaaccggtacgcataggagttggacaaaaatataatcttcgtttggaaggaggtagcgaagaatttcgttggggagcaggagtctattacaataaaattcaaggagctatgaaagattctgaccgtaatacattttcgggtacgttgacactttcctatacatttaaaaatttgatatttcaaaatcagatgatattggattacaataattcatcggaaagtaaatatggtacgtttagtgagtatgctaaaatgaatccttattggatgcctacggatgaatatggcaacactattccgatatataccacaatgttgggaacggaggttgaaaatccgttatataatgcgactcttaatacgaagaatgatatgaaatcggatgttatgaccaataatttttccattgagtggaatataattgacgatttgcagttcagagggcaatttggaatcagtaaaggacattcaagatatgataaatttcttcctgcagagcattcttcttttaatacggatgcatataaaagtcctgagaatttttttcgtaaaggaagttatgaatatagaacaggtgaaaatacttcattggagagtagggtgactttatcatattcaaagttgtttgcagaaaagcatcagttgtatgtcggtttggattggtcgttgatgcatagtaaggattttatttatacgtttaaagcagaaggatttaataatcaagattataattttttaggcaatgcgttgatgtatgagcgcaatgggaaacctacaggttctgaagaaatttccagacaagtgggatttaccggtaatttgaattatacttatgataaccgttattatgcagatttttcttttagagcagatggttcttctcaatttggtggagataagcgttttgcacctttttatagtattggtgtcggatggaatattcatagagaaaaattcatggaagaacagcaggtcgttaatttattgcggttgcgaggttcatacggaaagacaggttctcagcaattttcttcatatcaagctttgagaacttatcagaatcttagttccgaacgttatatgaattggagtggagtggaaatgttgggattgggaaatgaggatttggagtggcagattacagatcagtatgatttgggtatagaacttggattgtggcaaaatcgtttgtcgttgacttttgatgcctataaaaaaataacatctaatcttttatctcagatggatttgcctttggcaaatggttttccttcttatacggcaaatatcggagaggtgaataatattggatttgaagccggagttaatggatatgttatccgtaatacggagaaagaagtaatttggatgttgggaactaaattagcatatacgaaaaatgaaataacgaaattatcggatgctattaagaatcagatgtccaattatgtaggaaaaaatacaactcataatatgttaagggaaggagattcccgttatgccatttatgcggtgccttcattaggaatagaccctagtactggaaaagaattgtatttggatgcagatggaaatgtgacgactacatggcaaggtggtgcgcgacgctattgcgggcagacagaaccaaaatttcggggtaattttaactcattgtttacatataaggattttacgttgaatctgaattttggatttcattgggggggacagcagtataatcagactttgttgaataaggtggaagtgacgaattatgatatcgagtataatgtagatgagcgggtttggtcagaccgttggcagaaacctggggatttgaaaccttttaaaggctatggtaatgaaaatacattgatgtcttccaggtttattatggatgataatgtctttcagttgcaaagtgccagtttgcaatatcgttggcattcaccttttgtgacaaaattaggtatgcggagtataaattttgatgtcaatatgtcggatgtgttttacatttcttctattaaacgggagagaggaacggaatatccttttgcacggagaatagagtttgctgttaatctgatattttaaattgctaaataaatactgatatgaaaacaaggtttaatatatttgcatttctgtttatggctatgctcttaggcagcagttgtaatgactggttggatgtgaagcctcagtcgcagatggagaatgaagatatgttctctactgaaaaaggatttaaggatgctttgacaggttgttatataaagttggcaaaaccggcattgtatggtacaggtatgaccatgacttttactgaatatttggctcaattttgggattttgatatgaataatggaagtgatgccagtgcaatcaaggctttcaattataataatgctcatgttgagggggaaattaaaggtatttatgctgcattttacgaagtgatagttcatgccaatagtgtattggaaaatatcagacagaatgggaacgtcgtaaagaatgaaaatttgcgaaaaataatcgaggcagaggcattggctattagagccttttgtcataccgatattttacggttatttggtcagattcctcaaaattctacaattccagtgcaattgccatatgctactaccgtatcgatagatgcagtgccttattattcttatgaacagtttacttctttgatttttaaagatatagattcagcccaacaacttttggcagataatgatcctgtttttcaatatactttcgaagagttggataattatatggataaaaaaaataataacgttgatttagaggattcttttttgggatttcgccgtatgcgttttaattattgggcattggaaggattaaaagcccgtttgtatctttatatgggagataaagaaaatgcttgtattgccgctaataatgtaataaatgctaaaacaaaagatgggaaaaaaatggtagttttatctggtcttactgatttgcatagtgataaaatgtatatgacttgtccttctgaatgtatcttggccttaaataataaccatttggcggaatatgacgagaatcttttcaattcgagaggaggacatcttactgaagctcattacaaggatttatatgatgggcagtctgtagatattaacaatcgtcctaaaaagatttggaaaaggacagaaaaggcaattgcgggaatgttctattatgattttcagaaatatgtgcagccggcaaaagaggagagtgagtttaccactcattttaatttgattccgttaatccgtttgtctgaaatgtatctgatagcaatggaaaccgtgtccgatatagcagaagcaaatgcattgtataaaatatatatggaagatagaggagttgttgcgaaagatttggataaacagcaattggaagatgaaatattgaaagaatatcgtcgtgaattttttggtgaagggcagatgttttttacttataaacgtttggggacgaaaaaaatgttgtggaaacgagatcgtgaagtaacagaaaaggattacattttgccacttccgaatacagagttaggaaacaattaaaatcattatcatgaaatataatttaaattattttgtaataggtattttgacaattttgtcaattgcctgtgaacaggaaattgatgtttatcatgaaaaaggtaacgaccgtttgaatttttattatgcgaatcctttatatccagatagtctgactgtttatacatttatttatttgccatccgaacagatgtcggatactatttgggtagaggtggaaacatccggttttgtgacagattatccccgtcctattttgtttgaacaaatttcagagggagatagtgcagctgttgctggtaagcattatttagcttttgatgatacagcattgaaagacatgtatattgtacctgctaatgctaatcgcatgaaagtacctgtcgtgttgattaaaacaccggaattggcagaaaaggaagtcactctaaggtttaaggttaaagaaaatggatattttaaaccgggatttccaggtaatgatatacgtacgatcagattttctaatattttgactcgtcccgttcattgggacgataaggcttcgtggtattttgccggggaatatggtcctgtaaaacatcgttttatgattgatgcagcagcaaagaaaggggtggttgttgatgaagatttttttgtcgatttggtcggagaacccgatgatttttcggtagacataggattaacggattattggaaaaattattttcagacagcattgaatgaagaaaatgctaagcggaaaaagcagggcttggatattttgcgagaagctccgggagaaggggaagtggtagggcgtgaagttactttcttacaataaaacgagtaattatgaaaaataaattatatattataggaacatttgttctaagttgttttgcctgttttgatgataaaggcaattatgattattctgaattttcggaagtagttattcaggatgtagatgaaaaatatgaaaaaattttattaaaagatacgcttagaataaagccaaaggtaactcccgaaggtaagacgtacgaatacctgtggacaataaatcagcgctatggaggcgaatcgtcagacgtggaaaatgtgaaaaccgatacgattggaataggtccagaattggaatatcttgtatctaaaccagccggtatttatgaagtcaatttgaaagtgacagataaagaaagcggatattctgtattttcaaatagtcagcttgtcattaaaagtgagttttctttaggattctatgtgtttaaggagactgttgaaggatcaacagaagtcgatttgcatacaccgaatttgtctttgaataatttgcttgcaacttcttcgggaggagttatcaccgggcgaccggttagtatggggttgttgtttcagtattgccacatagatccggaaacagcggaatatattattccgccagccctgactatctgtacggaaaatgatgtaagaattatcaatttaaataatttgaatacgatttttacacgtgttgatatgttttggggagatgaattaacaggagagaaacctttttatatctatcctaatttctacaatatagtttgtttgtcttctggtggttgcattagtagttatcaaaatggattgggaatacccggtgccggtaaatttggtttgccagtgccgatgggagaaccttatgctcctgatattcattctattgtttctcctggtaattattgtagttatttgtacgatacaattaattgtcgcttttttgcttttgatgccaatgggactcctttactttttgatgaagaaggtaaaatttccaataaattacccaagagtcatgagttgttattctttggatataataaaatttccggagagagagggtatgctttttttagagatggaaagaatcggtatttgtattctctgctttttgatgaatggagtaatcccattcaaaaagtagatacaatagatactgcgttagcattaaacagcactgttgttattggcaataatgaaaatcaagctaatttgttatattatgctgtagctggtaaaatatatatgtatgaaattgaacgagaaaaggaatctgaacttaaattggaagggttccaaggcggggaggtgacatatatcagcaatcgttattggttgtcagaagaggataaagatcataatttcgattattttactgtcgctacttatgctgatgggaaatataaaatttatttgtataataccgtcggtggaattccaactggtcgaccggagagaatacttgaaggagagggtaaggtgttaaagatgcatttcctttctccttttatgggtagtaatgattctgcagtagagtgttatccatgtcatttttaaataaatcagcggtaggacgaaaaccacaaagtcctatcgctatctttttgaaagatatgaaatttattttatgtatagtttgtttgttgttttttgcttgtcgctatgagtctaagtctattgtaattagtgggcagctattgcaatcatctgaaacaaaagaattgtgtgttgtttctatgggggggactgatatggttgcaatttggaaattgagagaagacggttcgtttacgtataaagggattttgccattagggaaacttttagtggtgcgatggggaaatcacagcattcctttatatatagaagaggagcattataaattgaataatcaaaatggggtgtattttttcaagacggctgctgattcttcccttcataatagttttgttgtttatcaacaagaagaaaaagcattaatgcaagcctatgatgctaagtgttgtggttatgatacgatatcagacatacatcgtaaagcggattataatgcgtttttggcaaaagagtttgataaaattgaagattttaggctgaaagctatacatagatttgccggaacagaattagcagagtcaatagtttatgaatcgttgtttttctatgagtctaactataaatattttgaaaaagcgatagaagcattaggagatactattccaaatggaaagatgaaacaagcaatttttaaagcatatgagaatttgaaaaagaaacaattgacaggaatagctccaaattttattttgccagacaaaaatggtaagaatgtatcgttaacagattttcgaggcaagtatgttttagtggatttttgggcctcatggtgtgctccttgtagagagaaaaaccgtgcattatatgagcaatatggtcaattgaagaagttgggactggaagttatttcaatttctatggatgataataaggatgcctggttgaaggctatccgagaagatggtatacagtggactcaattggtggatttaaggggtttcaaagaaagttcagtgagaaaggagtataaagttgagcaggtccctgcggtttatctaattggacctaatggggatgtaatagcaaaagatccaacaaacaaagaattggtagaatatgtaaaatagtataagatgaaattttttatattgatattgataagtttatttgtaataacgaatttacaaggacaaaatgtagtcttttataatgtgaatatagtgaatgttgataaaggtaatattgtttatggaaggactgttgttgttgaaaatggtattatcacgaaaataagtaaagctaaaaaacacataaaaaatgggcagatagatagaagcggatattatatgatgcccggattaatagagtctcatactcattggggtaattttagttttaatgaaaaggtaatgcaaaagatggctgattcttttttggaatgtggagtgacaacagttcgagatgccggtggtaatgcagatgttgccaaacaatattctatgcgtttggagaaaggggagattatggggcctacggtgtatttatcatcattttgggttggccctgattatcaattacaagattctgtggaacatgtttgggagagaactattccatatagtgcaacggtagaacagttggagcaatttatattggaagcaaaagagtttggttgttggggattgaagttgtatagtgacctttcttatgaaatgttacaaaagatagtccctctatgtcataagcacggtctaagaccctggggacattttgcaacatcaccggcatcagcgttagagtgtgttaaggcagggatcgaaacggtttctcatgcttatttgatagaagaaatggagggatttacagaagaggggagagctagaagatttacaccggaaaagattgcttatagagattctgtttatcgtgagatggtaaagcgggggactattttagatgctacaaccagattgtgttgtcaagaggatgctgctctttatgtaaatactttgtttaccaaggatgcctatttagcaggagtaaaaattgcagcaggtactgattgtgtagattttgatcatgataatagatgtgtgttgttggaagagatgaaaatattgcatgattcttgtggaatgagtattcctgatgtattgcgagctgctacaacaatcggagcagaagttcttggtttaaagggaaagttaggtattataaagaaaggagctgaggcagatattttattattaagaagtaatcctttaatttcactcgttgctttactaaaagagaaagaggtgtatgtggatgggaaaaaaggatatggcaaattttaatattattgattaattcggagtgttttgtcttagaaaaccttgtatgattcgtaaataaagagtatctttgcatcgtttttaacgatattatttaatttaaagtatttaaaatcatgtatttatcagcagaaaagaaagaagagcttttttctcagtacggaaagtctaataaagatacaggttctgcggaatctcagattgctttattttcctaccgtattgctcatttgaccgaacacttgaagaaaaatcataaagacttcggtacacagaaagcattgattagattagttggaaaacgtcgggcattgcttgactatctgaaagaccgcgacattgaaagataccgtgctattgtaaaagcattgaatctgcgtaaataaaagatacgttttcccaagcccggtaaaatccgggcttgtttatatcctccctcctccctccactaaaaaagaattccgttaaaagttttattttaaccgttattgaatgatgaatgttattgaaaaaacgattactctggctgacggaagagtaattacactggaaacaggcaaattagctaagcaggctgatggtgctgtcatggtgaaaatgggcaatacgatgttgctcgcaactgtagtatctgctcaggaagcaggcccagacgtggattttatgccgctgtctgttgattataaagaaaagtttgcttcagtgggacgtttccctggaggatttacaagaagagaaggaaaatcttctgattatgaaattttggtttctcgtttggtggaccgtgctttgcgtcctttattcccagatgattaccatgctgaaactttcgtacaagttacattatattctgctgatgaggagtctatgccggatgctttggctggcttggcagcctctgcagctattgctgtgagtgatattccttttcatggaccgatttctgaagttcgtgtggcccgtattgatggcgaattggttattaatccgacagcttctgcattgaaacgtgcagacttggatattatggtaggtgctacttacgaaaatatcatgatggttgaaggtgagatgaacgaagtgtcagagaaggagatgttggatgccatcaaatttgctcatgctgctattaaggaacagtgcttggttcagaaagaattggctgaagctgttggaaaagagaaacgcgtttattgtcatgaagtaaatgacgaagaattgcgtaaagatatatgggataagtgttatcaaaaagcgtatgatgttgctcgtcagtgtaatgctaacaaacatttgcgtggtgagttattggataatgtacgtgcagaatatctggctactttaagcgaggaagatcaggaagctaagaagaatttggtggcacgttattatcatgatgttgaaaaagaggctatgcgccgtatgattctagatgaaggagtgcgtttggatggacgtacaacggaacagattcgtccgatttggtgtgaagtaggttatctgccaggacctcatggatcttctatttttactcgtggagagacacagtctttgtctactgttactttaggtacaaaattggatgagaagattgttgatgaagctacgatacaaggtaaagagcgtttcttgttacactataatttccctccgttttcaacaggagaggctaaagcatctcgtggagtaggccgtcgtgaaattggtcacggaaatttggctttacgtgcattgaagcctatgattcctacagattttccttatactgttcgtgtggtttctgatattttggaatctaatggttcgtcttctatggcaactgtttgtgcaggaaccttggctttaatggatgccggtgtgcctatgaaaaaacctgtcacaggtattgcaatgggattgattaccgataaaggttgtgagaaatatgcaatcctgtccgatattttaggtgatgaagaccatctgggagatatggactttaaagtgactggaactcgtgatggaattactgcaacacagatggatatcaaggtggatggtttgtcttatgacatcatggaacaggctttggaacaggctaagcgtggacgtatgcatattatggatatcattactcagacgatgccggctcctcgtgaggatttgaaacctcatgctccccgtattgtatctttgaccattgataaagatcaaattggtgcattgattggtcctggaggtaagattattcaggatattcaagagaaatctggagctgttatcaatattgaagaggttgataataagggtattgtagatgtagctgcttctaataaggagtctatagataaggcattggctcgtattcgtgctattgttgcaaaacctgaagtgggagaagtatatgatggtgttgtgaaatcaatcatgccgtttggagcatttgttgaaattcttcctggtaaagatggtttgttgcatgtatcagaaattgattataaacgcattgaaaatgtagaagatgtgttgaaagagggtgaccgtattcaggtgaaattgttggaaattgatcctaaaacatcaaaattacgtctttctcacaaagcattgttgcctaaaccggaaggttatcaagaacgcagtgaacgtcctcgtggcgaacgtcctgaacgtagagaacgtggtggtgagcgtcatgaacgtcgtgagcgtcctgaaaaatcaactaatcgtcctgaaaaatcagaacaataaataaagtgacccgcctcaataggcgggtttctttttaggtagaaatttctaataattttctatctttgcacggagaatctgtcgcgtcggcagatactgttcataaagtttatatagatatggaaaataaattagtagtgggtatttcccatggagatgtaaatggtataggctatgaattgatcataaaaatgatggcagagaacagaatttgtgaagtgtgtactcctgtcttgttcggttcttctaaagcggcagcctatcatcgtaaaacgttgaatatagaaaattttagtctgaacagtatacagcgtccgtctgaagctaatgctaagcgttgtaatgtgattaattgtgtggatgatgctgtaaaagttgatttgggacgtgaaactcaagagtcagatgaggctgctatggttgctttgcggcaaggaatagattatttggatcggaaagaaatagatgttcttgttggtgctcctcaaggatgtgcttcttttgctccggaagcaggttgtccgtcattgttcgccaagcattatgatgtgcgtaatgtaatgcctttgttagtgggtgaaaagatgaaaataggttttgtaaccaatcatttggctgtaaaaaacattgcagagagcatctcttttggtaatgtttacaataaacttcgcttgttggatagttgtttgcaaaaagattttacgatacgtaagcctcgtattgctgtattgggtttaaatccgcatgccggtgaaaatggcaagtatggcaatgaagagaagaacgttataattccggcaatggaaaaagcacgtaataatggtatcatggctttgggaccttattctccggaggctttattcagtagtatggaatatagtaagtttgatgtgatattggcaatgtatcatgatcagggaatgttgccatttaaggcaattgaaggtaatagtggagctgttttacttgcaggtttgcccgttgtttatacttcaaccgttcatggtatggcatatgatatcgttggacaaggtattgccgatgaatcgggtttgcgtaatgctatttatctggcaatagatgtttataatcagcgcaagttgaatatggaacttgcagaaaatcctttgcggcattatgatatagctgctaatagtaatgaaagtgatttgaatgtagagcaaatagctggagtgcatgaagaagaataaataaaaaagctaagagattatcctcttagcttttttaatattttaggaatatacgttgtaatatgacgtttctttttagcttcatatacatctgctattttaatgagaatcgcagtttcttctacaccaccgaagcccggattaatggctgtaccgaatgttttcattgaaggtgacaaactcatgtaggcattgactaaaggcggtatattttctcctaattcacgtacatggcgcgaaagtattttatagtcttcgttataatttccattagtaaaaatctgctccaaggcttgctcgttaatattaatcggcaatggtttgataggagagacaagattttctttatctcggaaatatttcttcataaaatagagaatcatgttacgcgcctggatattaaaactagtgtacatggtaactttgccgaagaaatattcgatttcaggatggtcaactgttaatgctcccagaccatcccataggttgtcaagggcaaacatagatttacttcccatgcgggttgattgatagagaggatgcacaaatgagcgtcctaattcaatcattttaggtaaatatactctcttgaattgttctgagaaacggaacaattctgttgttgctagatagggttcaccttctgcattattttctagatgatcacatatgataaatcgatagcctcccaatattgcttgttcctgtgggtcccaaacaataagttgttggtaaggagtatcgggagcgatgtcaaattcatcaatatcaatttccttccctgtacctccacctgcactacggaatgtcagctctcgtatacgacctacttcgcgcatcaattgaggcgcagtgtgggcatcaaaaatataaatctcatttcctcctttattggttttccgtacaaaccggtcttctgtaagttcggctataagtttttctttttcaacagggtatatgacaggttgcatatctgggatgttttgaattgtaactattttccaattgtattttacaattttcttcgaagtgtaaatatatatctttctgctggattttggatgcgaactattaaaaatatgtgatatagtctttctgtttctaagttttttgtatcttcacgaacttgaaatggaataagtatgtttatgagagtttttttgaatgttataaagattatatgtttgggattttgtagtatattatcctttatatcgtgtgctgattctgataccataaagaaagatattgaacgtacggtgttagtttatatggctgctgataataacttgagtagttttggaaatacgaatattcagttgatgttgcagggcatgaaaaatgtagagggtaggcttattatttatttggatccgtcaaatgatgttcctcgtctgatggtgatagaagggaattctgctcctaaattagatacgttagttacttattctgaagaaaattcggcatcaccggaagtgttgagaagaacgatacaagatgtaagaaatttgtatccttcaaattcgtatggtttgattctttggtcacatgggatggggtggttgcctgaaaaatataattttcatcgttcttattctgcaggtttggtaagatatacaaatttaccgactaaatactttggacaagatactcatccaggagatggagcaatggaaagttttatggaaactgatgaattgatggcgagtatttccggatattttaattttattatgtttgatgcttgttttatgggagctgtcgaggtattatatggattacgtgattacgcagattattttattgcttctccggcagaaatacttgctaatggttttccctatgataaaatagttccttggttatggggagatgaggaggatttaaaaagagtatgtgctgaatattttaattattataatacttatcccgatcccaatgatgcaggttggaattctgcaactgttgctttggtgaaatcttcggaattgcagcatttggtagagttgacttcaaatattgtcggagagaataaatgtgttgcatcaactgatgtttggagatatcctttgagtaaatcatcgcttcctaatgtgttctatgacctgggagattatattaatacttatggagatgaatctcaacaatccgcttataagcagcagttggaaaaaacggtagtatttaaagctgcaacaccgactttttttggtcaaacaattcctaccgataaatttagtggattatctgtatatattcctcagactcgttgggacgatatgaaccaaatatactatcagttggagtgggcgcgtacagtttatggtaaataatgcaatgaatcgtagaattttacaattagccgtaccatcaattatatccaatattaccgtacctttgttagggttggtggatgttacaattgtcggtcatcttggtgcacctgcttatattggtgccattgcaattggtgggttgttatttaatattctttattggaattttggcttcttgcgaatggggacaagtggattgacttcgcaagcctatgggaggaaggatgctatcggagaaatacgcgtgttggtgcaggccattagcgtagctttattatcagccacttgtattttattattgcagtatccggttgagaaactggctttttggttattggatacaagtgccgaagttgaacaatatgccgtttcttactttcgggtttgtatttggggagctcccgcggtcttatcaatgtactgtttcaagggatggttcataggaatgcagaattctcgatacccaatgtatatagctattgctgtgaatattatcaatatactttgcagtctctgctttgtgtttttgctggggatgaaagtagaaggtgttgctttaggcacagtggttgctgagtggtctggtttgggtttggcattggtattatggagtaaaaaatatggagtattgcgcaccaaattatctttacattccagccttcatttaggtgctatgcggcatttttttgcagtgaaccgtgatatttttttacgaacactatgtttgatagcagtgactacatttttcacttcaacaggagctcgacagggagatgttatattggcagtcaatactttgttgatgcaattatttactcttttttcttatattatggatggatttgcttatgcggcagaagcattagctggtagatatatcggagcttgtgaccccggtcgtttgcggcatgctgttcgtaatttgtttggatggggtataggtatggcacttctttttacagctctgtatggaatcggagggcagagttttttaggtcttttgaccaatgaacaaaatgttatacaagtggcaggtgaatatttttattgggtattggcaattccgttagctggttttgctgcattcttgtgggatggtattttaataggtgcaacagctaccaggcagatgttgttagcaatgatcgtgtccgctgccgcatttttctttatatattatttcttttcaggggcgacagataaccatatcctttggttggctttcttggtttatctttttttacgtggggtgatgatgactatttgggggcagaaagtattttctgtgcaatatatgaaaagagtagggtgccattgatagagtttttactccataatagcaccgtcttgaatcgcaatatcttgggcatagaggctatcaataataccgtctcctaacccgatggtcggaacaagtattgtatgagcattgcaattatctactacttctagaaaaatatccgcagcataagaaattacatcagcccggtctttacgcattttatatttaagcatacgttcctctgtagtcatcattttcaattgattattgatgaaccgtaatttttcaatgttgaattctatattgtttttgttatctaattcagccaatcggaatagtttgttgatatttccaccagaacctataattttaagttcaggatagagcgatgcaaactgatttaaatcatgttgcagctgtatatgtgtttctgttttgaccgagccttcaagcaagcgcaccgttccgatattgtacgagcgggaattttttagctgcccttcatggatgaggctgatttcagtacttcctccacctacatctacatagatatagtttgcttttttatccaggagttcttcgatatgattgtcatatataagacgagcttcttcttctccgttaattatatcgatatggacacctgtttttctacagatttcgtttatcaactcctgaccgtttgtcgcatctcgtacagcagatgttgcacaagctcgatattgtttgacatcataaattttcatcaattgccggtaggctttggtaagtcggagaagttttttagctttctctgtcgaaatgcttcctgttgaaaaggtgtcttctcctaaacggataggtacacgtaccagttgttcttttgtaaaaatggtggtatcttttctcgtatctacacttttaatcagtaggcggacagcatttgagccgatatctatggctgcataatatatttttcccatggtttattttatagattgattttgtgaatctgcctcttggcgataatagttgtatagtgcaacttgcgaatgtatgctttctccagattggatagaccagggaagattgtctcctcttccgttcacacatcgtccttggaatgtatcctgaaggccgtattcaacaatacgtttcagttctgcttgtatgtctggatcgtataccggtgtcatgacttctatacggttatttaaattacgaggcatccaatctgcagaaccgatgatataactttcttctcctccatttgcaaaaatgaaaatgcgagaatgctccaggtatctgtcaatgataccattgattcggatattttcgctgataccggtaataccggttacgatggaacaattgccacgtaccagtaaatctatttttaccccagcagtggaagcttcatataacttttgaacaatttccttgtctgtgatatgatttacttttcctttaatataggcaggcttgcctgctttggcatttcggatctctttattgatgcgcagtatcagttgatggcgcatatcgttgggtgaaactagtaattccttgaagcgtatgggaatatagggcgtttcaataaacgaaaatacccagtccacctcttggacaatttttttatgagcggtcatgacaaccacatccgtatattgcgcagcattcccttcgtggaaattaccggtactaatacaagcgatatcgcctcgccggcaaccgatatgcactaatttagaatgaattttcaatccttcaataccaaaaactactttgataccggcatcttgcatttgtttggaccaattgatattggaggcttcatcaaaacgggccattaattcgataataaccgttacctttttgccattgcgggctgcggcaattagtgttttgacgacttttgaattctttgcaaggcggtaaagagtcattttaatgctgtttacctccggattgatagctgcttctcgcagtaagcgtaagaacgacgagaaactgtgatagggataatgtagaaagtggtcttttttgcgtatagcttccaatagactgcttgagattgtaaattccggctttatgatagcctcttgttttgtgaattttaattctttccgattgcagtctggaaatttcatcagatctttcatattatggtagcgacctccggcaatttgggtatcccattggtctatgtgtagcatccgactgatgtctctgagcattccaagaggcatgtctgtatcatatatcaatcggattggatcgccttttttgcggcttttgacacctttggagattttttgcatgacactgttacgtaggtctgtatcaagttccatttcagcgtcttttgtaaatttaaatgtataagcatcaaagccggtgaaaggagttcctgcaaatataaaaggtaagcaataacgaattacgtcatcaagaaatatcagacatattttaccgtctctgtctggtaagcgtaggaaacggccatattctttgactggtaattctattaaagcatattttttccctttactcttttgctctttaccttcccataactggatggctaaataaatttcatcatccggctggtcgtttaattgtcggaatcctgaaaaatagagtggtgtagtagaaccgttgaggctggtatgatacagatgtataatgaaatcctgttgctcttgattaagctcttgttcgtttagcagccaaatgttattttgtttaagacattcttctatggagtgaaatgttttttcgaattcaacagaatatttgctattcaaacggttgatctctttataggtttcaatggccgtaccacgttcgcgtcgaatagctttgtcttcatattcaatgatatggttcagtgttgccatacgaactctaaagaattcatccaaattatttgagtagatacccaagaaggtaagacgttccaataagggtaccgattctttttgtgcttctaataaaatgcgttggttaaaatacatccagcttatatctctttctatatatgattctgacatttgcttgtctgtttttttcatgagggctcagactttaatttatattttttgattggcaaatgtagatgagatatgttacgaagatattttcaaaatattacattaatgttgaatattaaaaaatgctttatgtctgatggcataaagcattttttatatgtttggtgttagtgttttattcaatacctcttagttttttcaccatagcttcagcaatagctttgcactgttcaatgtcagatggtttcatggaaccacaagtttcgtttggttcagcaactacatcccatttaatcttttctgcaaatgccttaaagcgtggcagagcaccaccgccccaagttttatttccgaaatatcccaaataatggtttttcactcccatacattccaattcatgcaacaggatttccattgtagggaaaatattaccattatatgcacaacttccgagaatgactcctttataacggaaaatatcattgatgatatatgacggatgagtttttgaagtatcgtggatgcgaatcttcttgattcccatttctgctaagaagcgaccgatgcaatctgccatctgttcggtatgtccgtacatactgctaaatgcaataacaacgccttcgtcagtttcatatttactccacttgtcatatttggcaatgatttctgcaatgtgcgtacgccaaataggaccatgagttgcacaaatcatatctataggaagaccgcccaacttttttaaagctgcctgtgcaggagctccgtatttaccgacaatattggaatagtaacggcttatttcttcttccatatattcaaggtctacctgatcatcaaagattccgccatctaatgtaccaaatgaaccgaatgcgtcagcactgaaaagtacgttatctcctggtaaataagttaccattgtttccggccaatggagcataggcaccatataaaaattcaaagtacgttcgcctaaacagagagaatcaccttcttttacttccagaagattattggagattccatagtagttttgcaacatggggaaagttttgctgttgccgacaacggtgatatccggatattggcaaagcaatgccttaatagaaccggaatggtctggctctacatggtttaccaccaaatagtctaccttgcgtccttgaagaaccgcttcaagactttccagataattgtccatgtggctacgttccactgtgtccaatacaactactttctcgtcgagaatcacataagagttgtaggcaactccttttggcaatggccaataattttcaaaaatatgagttcttctgtcattgacccccagccaataaatgtttttcttgatttcaattgcactgttcatattgtaactgtttttaatttacttttgatgatggcacaaatatacgaagaacacatgaatattttggcattttatatataaataaagtcgttggataatttatttggtggtataaatttaataatattaattatgctcgtttgtctatttttgttttctttgcagaaagtagtaaatgaatagtcgatacaaaatgggaattttaaatacaatattaggcaatgtatcggaaatggatgccgatgcactgaagaaagaatttggtgtacttctttgtgaagatgagcgaatagagaaagcttacaaattgattcgtgataaatggattttcaccaataagcgtctgattattttagatgttcagggtgtgactggtaaaaaacgtgagtaccattctattccgtaccgttcggtaaatcatttcttaatcgaaacagcagggacattggatacagacgcagaaatgaaaatttggataaaaggttgcgatgctcctttgacacagaattttggtagaaattcgaatcttgctgaaatacaaagagtgttggcagactatgtcttgtaagcttatgtataaattactctcaatgaacagatagtttgattaagtaaaggaagtaactatgaattcaatgcccataatacaggaaattctgtcagacagaagacggtttatgtctcttttattgcttgcagacgagcaggaatctatggttgagcgttatttggaacgtgggcgtatgtttgttatgtattctttcgaggagggagaaccaatagtaactgcaattgtcacggaggaagatgattgtgtttgcgagctgaaaagtctggctgtgtctccctcttttcaacggcagggatttggacgcatgatgatgaatttcttgtgtcgtctttattcggataggtttgatgttatgtttgtgggtactggagatagtttttcaactatttctttttatgaaaactgtggatttcattattcgcatgttgtacctgattttttcaggttaaattatgatcatcccatttgggaagagggaaaattactgaaggacatggtttatttgaaaaagcagttattgtagagaataagtatacttgtatagagaatcagtgcccaagaccaattgtttgaatggaacttgccatggtctaaaaaaataatgtcttttggctgtctgttgtctgaatagagaggaactaaatatttctaatagggagaaagagccaaaaagcagatggatggaattttaatttatgtgggtggaacacaatcaaaagaactgagaatgtaaattatgaggcaggctgattccttatcaaaagcgattgatagtgcaaataatttaatatttcagattctgttatcatatataaagatattaatcgggacaaaatttctgttttattgtataaaatcgggtcaaattggcctgatttataccttaaaaaacattattctgtcccgattcagcagtagctttgcaagaatggactttcactgtaaaaagaagtaagtggacttgtattttttccaaagtagaccgtctcactacttttgtctgatttgattttacaaaagtagagtcattcaagctttgtgattgcctattatgacggaaaacagaaaggaggaacttattatgcttgacgcgaggctcggaagaggggatgactgtcgtcaatttcttttcctaaaatgccgaacattttgctgattccgacaaaaatggccaaaaacattttgctgattccgacattttgtgtgtttttgtaataaaatgggcttcatttttcggtcactgctacatttttttgaggggtcttcaaagtgtagcagtaaatgtagcaaataatgaccgaactttgaaggctaaaccctacattcaggccttcaccttgttggggcgcaaaaataaaaaagcaccgtaatcagctgatatacggtgctttgaatgactttttgaaggcttttgtgaagtccttcgtttttgtttcagcggagagagaggctctcgaacctacatattcaagaaatatcataaaattgcaaatcattaataatcaagcactatttggagtacatagtaaatctaaatctttctgaatatcttttgctattccaaatattgggtgtatatttgggtgtagaatttcaaacacacccaattatgaatatcaaacgaaacatcatttttgcattggaaagccggaagaagaacggtgtgccaatcgtggagaacgtgcctatccgtatgcgtgtcatatacgcaagtcagcgcattgagtttacaacgggttaccgcattgatgtagccaagtgggatgctgacaagcagcgagtgaagaacgggtgtaccaacaaactaaagcaaagtgcatctgaaatcaatgccgatctgctgaaatactataccgaaattcaaaacgtgttcaaggaatttgaggtacaggaagccatgcccactacccaacagctaaaggacgcattcaacctgcggatgaaagatacaagtgaagaccaggaagacgtaaagataagtttttgggaggtattcgatgaatttgtaaaagaatgcggcaaccagaataactggactgaatccacatacgaaaagtttgcagccgttaaaaatcacctcaaggagttcaaggaagatttaacctttgaatatttcaatgaattcggactgaacgaatatgtcaatttcctgcgcgacaaaaaggatatgaggaacagtaccatcggtaaacaaatgggattcctcaaatggttcctgcggtggagcttcaagaaagactatcaccagaatatagcatacgatacgttcaaaccgaaattgaaaaccacccccaagaaggtaatcttcctgacatgggaagaactgaacagacttaaagactatcagatacccaaagacaaacagtatctggaacgtgtccgggatgttttcctgttctgttgctttaccagtctgcgttattcagatgttcgcaacctaaagagaagtgatgtcaagtccgaccatatagaagtcaccaccgttaaaacggcagatagtctgagtattgaactgaacaagtacagtaaagccatacttgaaaaatacaaggacatccattttgaaaaccacatggtattgcctgttatcagcaatcagaaaatgaatgattatctgaaagaactgggagaactggcagaaattaacgaacctatacgtgaaacctactataaagggaatgagcgcatagatgaagttaccccgaaatacgcattgctcagtactcatgcaggaagaagaacattcatctgtaatgcgctggctctaggtattccggcacaggttgtaatgaaatggacaggacacagtgattataaagccatgaagccctacattgacatagccgatgatattaaggctaatgcaatgaacaagtttaaccaactataaaagtatcagtctgtttcacagattatccattattagagttatctttgttaagtaatagttagtaatatggaaaataacaacgaacataatataaagaaaggtcattttgatgcctttgtccatgctgtcggttcggaaatagaacaggcacaagtccggctcattaccgcagccaatgcccagatgttgttccattactggaaaatgggcaattatatactgtaccaccaaaacctgcatggctggggtggtaaaattatcaagaagttggcacaggcaatcagattcaattatcctgaaaagaagggatattcggagcgtaatcttacttatatgtgccagtttgcccgtttatatccgttaaatgtacttcgtagttttattgaaacagattcaatactgtcagtccctaatattcaaaacattactaatgaagtccttaaactcaacagcgggcaatttacgcaggagcttactgcgcaaatacaatcagctgataatcaatctttagaaattacgcaggaggttcctgcgcaatttcagaatgtagaaaaaacagtagcaaccatctataaaataaaaatagaggatatagaagatttattcttggcgtcaccgattgcaagaataaattgggcaagccatatggtcatactcaataatccgctaccattaggtgtaaggtattggtatatgaaacaatctgtagaaatgggttggagcagtaatgtgctgaaaatgcagattgaaagtaatctgtatgacagacaaatcaagagtaacaaggtaaacaacttcactgccacacttccggcacctcaaagcgatcttgccaattatctgttaaaagacccgtatatctttgacttggcaggagcaaaggaaaaggctgacgaaagggatatagaagaacagttggtaaagcatgtaacccattacttgctggaaatgggtaacggctttgcttttgttgccagacaaaaacatttccagattggggacagtgactttttcgccgacctgattctatataatatcaagctccacgcctatgtcgtcgtggaattgaaagcaacgccattcaaaccggaatatgcagggcagttaaatttctatatcaatgttgtagatgataaactgaggggagaaaatgataacaagaccatcggtcttttgctgtgcaggggtaaggatgaggtcgtggcacaatatgccttggctggatatgaccagccgataggtatcagcgactatcaattgagcaaggcagtacccgaaaatctgaaatctgccctaccgagtatagaagaagtggaagaagaactgaccttattccttgacaaggacaagaacccataatataaagtatatggcaggaaagatacagacgatgattccccaatatggagaacttaacagaatatacagagactatatagataattacgctttttcttttgacaggcagaaattcatatcggatttctatcaggagtataatgacatgaaatcctttgaagccgctatccttgaactggtgcttgacaagcaaaaagagcaatacaccttgatactcaacagtctgaaaactgaaatagaaaagagcatacaggcttatgagatacgcccgttaagtgacagagccatagaacgtgcttgctatcagcacatggaaaggtattctcaggaaattgaagcccagctggatgttacaagaagtctgagcaagccgctgaatgaagccaacaacaggtatgattccattggttacagggagcatacagccgaagaggaaaaacaggcagagaaagaatatgaacgctgcaaggctgaatatgacagggaaaaagccaaactgaacaaactctatgaccagcaaaaggctacaagaacagaggcattccaatatatgaagaactgttgtgcggacatataccgtcaaagctgcctttttctggatatattgaagaaatacattcctgacggaaagcaagagaataaatcaagcgagccaatcagtcagcaggaaacgacagaagaacaacaggaatatttcagcatgaaattactttcgctcattcatgaggtgtgcaaaggagaacagttcgaagaaatttccgcaccagatttctatgccaatatgaatcttcacccctgcaactgtaagctgaaaataaaaccgagagagaaaatacgtgtatgctatctgatattcctgatgagcgagaaactctccaaacaggacagggacaaatggaaagacagaatactgaaactgctggatattgacgacagctactacaaatccaagtacaaggagcctgtttcagatttccccagtgacagcaaccaaaatttcgccaaggaaatggaacatatattcagataatccgtgatatatcctgatactttacgaaagttccacttttaccactcaaaataatttttgagtggtatttttgttttctgatattcaataagatacaatgatattcagtttgtaccgtccccatccttaccactcataaccctacctaattttgcatcgttcgagaacagaaataacagccagtgcgcagggctgattgtttaacgactaaatagattggacgatgacaaatatccaagaattattatcaaaacccgtctggcaaatgacaggcgaagaattcatattcctgagtaagcacgcttcaggtcaggccgaagcattgccgcaacccgttacagacacggaaaagaagtatgtgtacggaatactcggtatagccaaactgttcgggtgcagtctgcccactgccaaccgcataaagaaaagcggtaagatagacaaggcgattacccagatagggcgcaagattatagttgatgcagaactggctcttgaacttgccggaaagaaaacaggaggacggaaataatgggaggtatgcttatggactatatgagagaaataaaggaaatatctgcagaacaggcgataatcctttggcaagcctcacgtctgagcctatcgaaaatctatgagaaagcacctgagattttaaaagtgcaaggttcggtcattggcacactgggcaatttcagtgcatccataggcaaagccaaaagtaaaaagactttcaatgtgtcggctattgtagccgcctcattgaaaaacggtacggtactacggtatgtggcagaacttccggagaacaaaaggaaagtcctttatgtggacacggaacaaagccattatcactgcctgaaagtcatgaaacgtattttacggctggccggtcttcctgatgacagggacaatgaacatctggagtttctcgctttgaggaaatacacgcccgaacagcgcatcaggattgtcgaacaggctatctataatacaccggacatagggcttgtaatcatagacggcatccgtgatatggtatatgacatcaacagtccgggagaatcgacacgcatcatatccaagttgatgcagtggacggatgacaggcaaatacacatccatacgatactccaccagaacaaaggcgatgaaaacgcaagagggcatatcggtacggagctgaacaacaaggcggaaaccgttcttctcgtggaaaaggacaagagcaacggggatataagcaatgtttcggccatgcacatacgtgcaatggatttcgagcctttcgctttccgtatcaacgacaatgcattgcctgaactcatagaggggtacagacccgaagcgaagaaacccggaagaccggaagaggaaaagttcgacccttacaggcatattaccgaacaacagcaccgcatagcactagaagcggctttcggactgaaagaggaatacggctacaaggatctggaaaccgccttaatcaagtcttatatgtcagtaggtgtaaaactgaaccatcaaaaggcggtatcacttatcaccatgctccggaacaaacggatgatagtacaggagaacggcaggaaatacacgttcaagccagactttcactattagaccgtctaacctgtaatcacttcactttattcggcaggtctatatattaaggataaagcgaagcgattgcagagaatgtaaaaccgcttcactttattaccgtatcctatatatacgaaaataaagtgaagtgattatacagaccgtacttcataaaaaggtacgggcgaaaagagaaataaatattccaaccattattcaaacactcatcttattatggatatacaaacagcaaaacaaatcaggatagcggattttctgtacagtttgggacattctcccgtcaagcagcaaggtatcaacctgtggtataaatccccgttacgggaagagacagagccctcgttcaaaataaataccgaacgcaaccaatggtatgattttgcaattggtaaaggtggaaatatcattgcactggcacaggaactctactattccgactatgtaccttatcttctacagaaaatcgaggaacagactccgcacatccgtcccgtatctttctcttttggcaagcagtcattttccgaaccgagttttcaggagttggacattgtacagctgacttctcctgccctgcttgcctatctacaggaaagagggataaacacggcactggcgaaaagagaatgtaaggaagcccgtttcacccacaacggcaaacgttatttcgccattgcttttccgaacatatcgggtggatatgaaatccgcaaccgatatttcaagggatgtatcgcaccaaaagaaatatcccatatcagacagtcaggaaagccaaggagtgcatgttacgtttttgagggatttatggattacctttcctttctgaccttaagactggaaagctgtccgcaatcacccgacttcgacagacaggattacatagttcttaattccgtagccaatgttcccaaggcactctatccgttgggaagctatgagcgcatccactgtttctttgacaatgaccgtgcaggaatggaagcaatacagcaaatcagaaaggagtatgatgctacccggtatatacgtgacgcctcgcaaatctacagtggatgtaaagatctgaacgaatatttacagaaacgaatagccgataggaaagagcaagcgcaatctgtcaaaaagaggaatgatacactatccaagaaaccgaaaggcttccggttatagcccactataactacacgcttcgctttcgtagttgtgggctctcccgaggggattagggctttgccctaatgacccactcagggcgtttcacccctgagaaccccgagcaaagagtgaccctctctttgcaatctccgcttatgggttacccctaagaacccctctgcgaaagcgagcaaagtaaatcaattgtaaacaaaggaaagaagctatggcaacaaaatcaagcatacatatcaagccttgcaacatcgcatcgagcgaggcacacaaccgaaggactgccgagtatatgcgtaatatcggggagtccagaatctatgtcgttcccgaactttccaccgataacgaacagtggataaatcccgacttcggcactcccgaactgcgaactcattatgacaatatcaagcaaatggtcaaggaaaagaccggacgtgccatgcaggaaaaggaaagggaacgcaagggaaagaatggaaagattatcaaggtggcgggatgctcacccatccgtgaaggagtattgcttatcagaccggacaccacactggctgatgtacgcaaattcggtgaagagtgccaaagacgctggggcatcactccgctacagattttcctgcataaagacgaagggcattggctgaacggtcagccggaagcagaagacaaggagagcttccaagtcggtaacagatggttcaaaccaaattatcatgctcatgtcgtattcgactggatgaaccatgaaactggaaagagccgaaagctcaatgacgaggatatggcaaccatgcagacccttgcttccgatattctcctgatggaacgtggacaggcaaaagctgtcacaggtaaagagcatctggaacgaaatgatttcatcattgagaagcagaaagccgaactgcaacgtatagaggaaaccaagcgacacaaggaacaacaagtaagccttgccgaacaggaactcaaacaggtaaaagcagagatacgcacggacaaactaaagaaaacagccaccaatgctgctaccgccatagcaagcggtgtaggttctcttttcggaagcggtaagctgaaagaactggaacatcacatcgagcagctacatcaggaaattaccaaacgggacaaagctactgatgaattaaaaattcagatacaacaaatacaggaacagcatagcagacaaattcgtaatcttcaaagaatacataatcaagaacttgaagccaaagacaaggaaatatcacgattgagcaccttgcttgaaaaagcccacaaatggtttcccatgttcaaagagatgttgagaatggaaaaattatgcgctgttatcgggtttaccaaagacatgatagaaaacctcttgacaaagaaagaatccatacaatgtagtggcaaaatttattccgaagaacacaggtggaaatttgacatcaagaatgatatttttagggttgagaaacatccgatggatagtggtaagcttatgctgaccataaaccgacaacccatagtacaatggtttaaggaacaatgggaaaagttacagcagaatctacgtaactcggtgcagagagagcaaaaatccagaggatttagaatatagaatagcctattattaataaaatcaagtatctatgcatccaaacagattgtttttattacagaatcaaaatcctaagaatttataaaaaatgaagcctaaagaagttttggaaaaatggatagattgctttaacaaagcagatgcttatcatatagcagagctgtatgctactaatgcagtaaatcatcaagtcgcaaacgaaccaataattggtaaagaatcaatctacaaaatgtttgtgaatgaatttgccactgctaaaatggtttgtatggtggaaaatatttttgaagatggcgaatgggctatcatggaatggaaagactctcttggacttcgtggatgcggattttttcatgtaaaagataacaaaatcgtctttcaaagagggtattgggataaactttcattcttgaagcaacacaatcttccaattgaataagtactatcagaatacggactgggaaattgaaatacccagtccgagttatataatgaattttacttgttaaactatttaaagtcagttggataacaaaccatacctttcacattctcagtagctccaggtattaattcagccaccatgcaatattcatgagagacttcgaaaggaaattcaattcctaaatcgatagccttgcgatagccaaatcgaggataatactctttatgccccaatacgactgctgtgccgtaacccaaaagtgctgccctctgatgggcttactgaatcaacatcccccccccaattcccttacgctggaattccggcaagactgccaatggagctacactcagggatgtgacagactgggtgtcactatctatctttacttctgtaagtaagatataccagacaatttgtttttctgtcattttcttgttcttatgtaataagcaaattttaaatcgacaattttcggaaaagtaaaatcgacacaaataagtcgagacaaaatgttaataatatcaattaaatactatagccaaaccctatttaaaggggattatccttattctttatcattgtcaaagatggattttctatttcccattctgtagctttgtccagagagtttaatgacttcacaatgatacaaaagccgatcaagtatagcagaggcaagcacttcatcatccagagtttttgcccattcagtcggagccttgtttgttgtgattatcaaggacgctttctcatggagagtgttgattaggttaaagaaacccgctgcatcttcttttttcacagggaacagcattatatcatcaatggcgacgaggtcagctttcaacaaacggttgtaggcagtcatggcagatggcatcagtgttttcattttaatggtgtttataacatcttccatcgtaaccatgtatgccttgtaaccttgcgataccgcttcatagacaagtcctgccgcaataaatgttttcccggtaccggatggtcccatgagtatcagattgtaattctgttcaagccatccgagatgccttaattcacgcagtcttggtgcggttatgccttgtgagtaattatggtcgaaaaggtctaggtcgtgtcttgacggcagagaagctgcttttagtcgccgttgtaagtctttgctatccctttccagaacttctctagcaagcaaatcatgtaaaaattcaacataggtcttgctctgttcccgtgcaatatgggcttcggattccaataacctcggaagggcatacaagcgtaaacgcgagcataaatttttaatctgttcgttcattatcatataaaaaaggtattgaatgttgatatgtctgttttatcgggcaccatggaagaggtatcggaggatgggaccggctctgtttctacaggaacttccacaagggcctctcctttgtggactctgatactttcggctactttcatcaggctacatccattaaagaccttcacttccaaacatcttgtaaaggcttctatcaacgtgggttctgtatagaagggatatcggagaagtataaactgcaggttgtctctatagttacgattcttatgaatgcgtagttcagataaataggtatcaatgaccgtatccccgggaagtcttttacggacagtagcctcgtaatcatccaaggcagcttcacggtctcgccgatgtgaggtattacttattaactgtcctttatctttgcagattttgtgtgctgctatatttttccctgtttcaaggctgtaaatatacagcatctcttccttttcttccagatatacctgtgttcggtgaccttggtaggtacctgtaggaacactgtaatagttccccttgtaggtaatcacgttatccttcctgacatgatggggtaaaagctttggggaagggattgtcggaattccccgataaggcatgagatggggtcttcccatctcgaactccactgatgggatacgacgtatgccatgatgctccataccgttagcagtacgttgcaaccatgcttgaacctcctcgttgagttgctctatggaggtaaattcacgtccccggagaaaattgtactttacgtacttcactacgttctctatctttcctttgctttcgggatctgatttacggcagaacaccggctcgaacccatgttcacgaaccaaggctcgaaagccgtgggtaagtatcaggtctcctaggttctccttgacaagaaaaaccttgtcctggtcataaactattttccgaggtactcccgagaaatattcaaaggcaagttcgtgggcataaactgcaagatcggtagtaaacggggtacggctgaaataaataaatttataacggctacggctaagactcattgcaaaaaaatatactttcaagggtatgccttgcgaagtcttcatccagcgttctccaaaatcgcattgggcatattgaccataaggtgtttccggttgcttctcataaggacggtaactcttttccaattctttgggcagattatgattcagacgtactcggttgacaaagttggataccgttttagctgtgacatggggaaggtctgtaaaatgttcccgtaaacggtcatggagttgcggagatgacaaaaatggccatttgcgtaactctccgataacataagcttcataatcatcaagtttatggctgtatcggcgctcgtaactttgactctgcttaaactcttcttctgtcatagacagatacttggacaccgtttgacggtgaagacctaatgatatgcctatttgactcttgtttaggccatttgaaaataattctttaactttgtaccacattagatacttctgtaatttggaagtctcactcatagcattgtgattagttgttgacaactctaatttacaatgctattttcttttattctattgtcgattttacttttccgatttttgacgatacaaaattaccgattacatcttatctaattgttaggctcattgttgttatacattgtttaattatagataaatcgtgaatatccttctctcttaaatcgtagcccgaatggaatacttgttgcccttttgcagaaatgcaagggatgcttctgccttcaaagactgctgttccaaaatagtccggttgaaattcataccagcctccatccaagtcggcttgtttggaagtgccgtccgcattcaagacaaaaggatggatatcaatatagcctaattctttgctatacagttccacacgggtgggcaaccaatttgtttcaatttgatatcctctctcctgcaaaagatcaaggagttggtctgtataattggcatcaaaatcaatgtcaatatctctatgcaagcgggtttgctgtccgtacaagacatccactccccagcctccatccaaccaaaactgcatgtccaggctttccaacaagtccaaaacttgaaataactctgtaatcgtagtgtgttctttctttgtcatataataattctttaataaataatactatgcgtaattatccaactgcttgattgaagaaataaaatttgcacccactccaatcagaaagataacccatccgctgatcataaagacggatgtgataccccatgcttccacccaatatcctgaagctacgatacccagcattgatggaaaggtactcaaactaaagatgagagaaaaagtccgtccaagcatgtccgaagccaagttctgctgaataatagcgatgaaaagcgcatggtaaatggaataggctatgcctcctgtaaatgttaggcaaacaaaacctataaatgcgcttgatggtaaataactggcgctaatcagatacaatcccaatatcacataagccgtatgcatcactaatgtttgcttgcttttcaaagccttacaggcaagtactaaaccgcccaacaatgcccctgagccccaacccatttccacaactcccatttgcaaaatgtttccgttgaaatgcagaagcgtcataaaaggaaataacgtaaaaacaggcataaggacaaaagtcaccagcgtaaagcatacgaataaaggcaaaatgcccattgtacgccgcaaggtatgccaacattccgtcagttcttttttgaaatctggaagaactttcgttttttgaagagaaggaatctggacacaaagtaaggtcagacaagcagcaacagctccgatcacatctatgagcagaatatactgtatgggaagccaaacaacgaggcttgcccctacaacgggagctatcacctcactgaaggattgaatggaatggtacaaacctgataccctgacaagatggtgcttgggaaccagtagagggatgcttgcctgtaaagcaggtgcatgaaacgtactgcctattgaacgacaagcagtcaatagataaaaaaaagaaaggtctttataacccttggttatcacaataaaaagacatagggtacagaacgcgatgaacaagtccgaataaaacatcgttttctttcgattccatctgtcaacatagaccccggcaaacaagcctaatacaaattgtggtaaaaatccagctaaaatagccagagataaagctgtcggggatttaaattcgttgctaatccaaaaaataatggagaagccaacaatcgtacttgttaaaatagatatgagttggcctattcctatcacggccaaagttgatttccaatgattcattgtgctaatatttcatgcgtttatagataagtactttcgtacattaagcaaaacgaaattctatccacacaaaaaacttgtattataatccactcctgacgttggaatacaataacaaatactttcaggacgatgtaaagtcctgaaaaatcaaagtgaatggatagataaatattagtcttttctcatcggattcttttaatatcgctactcttttattatgtagtggttgtattatcttaaataaaacaaaaacacccgactttacattcttgggtgcaaaactgggtgtttgttttgcaatctgctgattttcagcgtttgttgcggagagagagggttttgaacctacaaatctaaccgcttatatttcagctactttgctttcaaaatttcaaataggtaacgaaacagtaacgattttcagatgttgggcttgtccaactttgaccgctgtttgtctgcctaactttcgggttcaaagatacggctttcttttgaaactcgcaaatatctgataataaatatttttgggttagtgcaaggtgcaagctatatatataaatatatacttgcaccttgcactaaaaaaaagcactggggtacaaatgcttaaaacaaaatccgtatcttcgtaaccgattaaaaacaaacgtgtatgataataactaaccgtgaagaagtaatagataaagcgttcggcgtatttgtcaggatgaactacgagaaagcaagcattatcacgcttgccaaagcctgcggggtgacaaaaacgggtatcgtttattattttccgcacaagctggatttattcatggctgtggcggacaaatacgtgttgcaaatgcacgaaccggaaaacaagtttgccgctcctgccgatacgttggcggagttcatcgggcaatacgtggcgggggtagccgcttccatgaaaaggattgttgaactaattggcgataatagcagcccgcatgattgtagtcctaacttctactactttcactttctgtcacaagtgcgcatgtactatccgggcatcaggcagaaaattgagaaaatctaccgacaagactatgacctatgggagaaagtcatacagaaagcaaaagaaagcggggaaatcaggagtgacacggacgtgaagaaaacggctatcatgttccggcaaatgtttttaggactgtcatacgaacaagcatttctaaacggtttgaacgtggacgaactggcagaaaactttcgctatatctattcgctgcttaaagcctgatacagttttgtttttttaacctctattatttttgaacgcatgtttaagatatggtgtttttgttttatctttggagcatgaagcaaaattcagcgacatggataatgttcagaaacaaagaggaagcatcgtgctacacaaagaaacaagggacggtgcggactacatacggatagaatatgcgaacagtcaggctgtcgccctgctgctcgcccaagaaacgggcatagaaatggctggcaacggctctgcatacatagcgtcagccgctttcagcctgtcggatttctacgaccgctattcaccccacgcctatattgattacagccgggtttacgtgcggcatcccaaacccaaaagggaatacacactgccgaaaggctatctcgaactgctggaacaaaagcgttacagcccctcgaccgtcaaaacataccgtgcttatttcagcgacttcatggaatatcacaagggacggaacatcgaccgcctgaaagtgccggacatcaacaagtacatactctatcttgtgaacgagaagaaaatttcggtgtcgcaacagaatatgcgcatcaatgctatcaagttctattacgagcaggtgaaaggcggcaagcggcaatactacggcggtatcacccgtgccaaagagtacaagagcctgcccgaagtgttgagcaagaatgaaattaagcgcatccttgaccagctatccaacatcaagcatcgctgtatgatttccttggtatactctgccggattacggcgtagtgaactgctgaatctcaccccaaaagacagcaacagtgaaacgatgtccgtgcgcatcatgggcaaggggaagaaatgccgttattcgctgctttcgcccaagctgttggaagaactgcgacagtatttccgggaataccgtccgaagaaatggctgtttgagggcgaaacgcccggagttcaatactcggcaagcgcattggtgaaagtgctgaaagaagctgcacaacgtgcgggtatcaagcaccgggtacatgtacacatgctgcgccattcgtttgcaacccacctgctggaacaagggacagatttgcataccatacaagaattgttgggacacaacgacatcaagaccactaccatatatctacatgtgtcaagtgcgcacaaatcccaaatacccaatcctcttgattcactggatgattcatagggtgcagctattagagattaggaaatacacctgctgggtgttgtttaccaaaatatacagcaccttacgggtgatcttataaatacattagtaataaatagcacaatcaatatgtacgaaaaatttttagataagagcctaaacagcactcgccaaacggtagatgatacttttattgcaaaatatgctaatgcggtatcagaaaaaattatcgaactttggaaagaagttggacttggaacgttttgtgatggattgttcagaattattaaccccaataaatatcagacaatagtagatgatagttatcctctgtatgagtatgaaactgtaactccatttatgacaactgtttttggagatatttttgcttatgttaagaatcccgtgataggagattatgtcgtattcatcaatgtgagatacggaacattcaagattttatccgagaatgttgatatactattgaatgtggtaattttcaacaagagttgtttggaatcatggttctccttaaataaatatcctatgataaaatcagaaaaggatgttcctacattggatgaatgttacggatatgtcccagcattggtatcgggtggtatagaatcaatagataatatcaaaattctaaaagctattccatatatagaaacggtactccaatttattggggatttgaagcgagtgcgatagaatatattactaacaaaccgggataacggactaacgtcgtttcccgcttagccattagcaacaatcaaatcattatcgttattatggatatagaaagaatacttaaaacaagagaaaatgcaatatactacggcattggtgaataccaaaaagactgctttggttgggttggtggaaatgctccagcttgttttgatgataagtatttatcggacaaagataatctctatttttatctaacatttcaaaaccctttaaatcccaacaagcaaatatctattttcactccggaatttgatgttgcattggaatataacacatatcccgattgtaaattgttgttggttgaacatgaattaagtagtcaaagcaaaagtgatagatataaacaccccgaaatagatgaaatttattcaatatacgaaatgagtacagaaaaagatatgcctgaaaaaaattgtgcaatcaaatttgggggtaatgtaatgcctattcaatggggattagataatgatggtaaagtggttaaagatggaaatagcttcatttttcaaatcaacgaaatttgcataaaagatatttctgttttcatggctggctgtatatatgtttatggaaaaattgaaggtaataaagtcacaaatccatttgtggcatactgggaatattcctaataacgataaattgattaattatttcaaataggttgctaacaacgaaagatagcatctgacgatgctcctttctaaccattataaacaataaagccaatggatataaagaatgatatacatattatggaaatgaatgacaaactgtatcaacggttaaaacagtcagagcttgtcattcatgccaaagttgaaagtgttttacgacaaatctcttcatggaagtatgctacacatgaattttatgttcctgctccctatcaaaatgaattagcgggtttaccaaacggacgaatacgaaaaaatattgaagaaaaagaccgtctaaaaatagctggtctgtattcttttggctttaatgcagaaggaaaaatactttgttcgcaagaagctccagataatataggaaatggcatcataactgatatatatgagtatgataatgccttttcatattatgtatatcatgttaaatatatacccaatcaatatacaaccataatctcaataagctatttttatccataccatgaaatgaatatctttcagggtataaattcatataaagattggtcagtgtatttatatgaatatgataaagaaagaattagtaaagtacataggtatgcttctcgttgggacaatatgccagcagaggaatataattttgcctatgaaaataatcttttatgtgcaatagttggagagaaaagactaaagaatggagaattatatatccattggaaaaataaaaaagtttataacaaggaaagataacccctaaacggcgttcctttccaacccattataaacaatatgtatcgcattgcaaacatagtactatttgttcttgccattttcgtggtaatgggttgctcttgtagtaaaactctgtgtgaacgtaacatacaagatgatatactcaatattgataaattccgtaaacaaagtaaaaaagagtaccgctatatagaagaagatgcggaaagattgtttgcaaattcggcagcggtttatcccgatacattataccgccaacaatatacttcattgcaaggttatttctatggagaaactggatttgacttatattgtatatggtatgcacagtttaatgccaataataggaaacactatcgttgtgaacgtaagacattaaacaaaatattctattgtgtaaatgatatgttgagatgtattgccgggggcggaactggctttgcacatgaaacataccgcataccagcatacacagagtattacatctataaatatcagaatatggaagccaataaacagtaccaagataatgatataagccaaacgatttcaaatttatggcagataatggctacatataataacgaagatatgccctttgaaatattagcttataaaatgaaatacatatatgaaaatgtggaatatataaaatcattacttactgctgaaatatataattattgcctgcaagaatatatgtgcagactaataaacgaaaatgtaagtgagcaagaacaattaagtttataacaacgaaagatagcatctgacgatgctcctttctaaccattagtgataattgtgtaaaatatggatatagcaaaaattatatatataagtttaacaatgctgacagcatgggtatttatggatacagcatttccaatggatacttataagcatcttttgggagttataggctcttatatatgtgtaggctgttctgcgctgtttgcaagctggtttgcatggcattgggtacaccctttttcttacgttaagtatttattgtgtgggttgcttactacgtttttgtttcatgcaggcttaactattggttgcagtgttccaattatcattttatcttgtcgtggagttcatgtgataagtacagcacctataactctgtgggaagtattaagctatattttaagcattttcattatgtctttctattttgtgggactttttacttttggactatgcttgctaacagcgagtattacaaagatagtaatatggagattgaatataagtaacaatatcactaacaacgcaggataacggcaagccgttccctgctatacattaacattataatcttcaaattatgcgattaaacagtaggagaataataatttatatcggaatagcaattttattgattataataattgctactcgctgtctggattttttcttcttttttaatgaggataatagaagatatacaataggcacgttttctgacataggatattatcgtggttcaatctgcaaatttaattacaaagtgggtgattcaatttatattgttgatacaaggtttggactacatgataaagatttgaaaaatctaagattggttgtcaaatattcaaataaatgggttgaacattcagagctacttttagaggttgttcctaaatgggtgcttgcaccacccaaaggcggatgggaacagttccctcctgacataaactggaaaggagctgaattagatactgcatatatgaagaagatgaatttggaaataccataatttgatgagaataaaaatagaatgttaacaaggtcgagataacagctaaacgctgttgctcaccaaaccattataagcaatagtacatcaaattatgaacgaacaagtacaagaacattttagctgtgctgattggctcctaatacctgcatccgttagaaaagatgttgcagacatattgggactaacccttttgtctgaaaatgagcagtgggataacaacccaatactttgtactacttatgaaaatgcagacaattatcttaatgaccttttaccgagggttgataaggtattgatttcgtcattcattaacggatattatatcattgaagggaaatgtttgcgatatatctacgaaacattgagtaaaaggttttcagcaaaatgtggtgtctattacttctcgatagatttatgggaatatcgttgcgcttatggctattatgagagaagccaagaaaagcgtttttatagtgccgaattagatgctaccggaaatctacaagaagaagacagaggatgtgtattaagttgtgaaaatgacgcagaaagccatataccaaaggtaaagattgaggacgagcaagttcctaactcttggtttcttcctttaggtataatgtttaacttagggataacggatgcagagatacagcaaactctaagtaaactatgcagcatatatatgctggatagcacagatgctaaaatgataaagaatataataacagaaaaatttagcttataacaaggtcgagataacagctaaacgctgtccctcaccaaaccattagcaacaaataaaaataagaaatatgaactataaaacaatgctcgcaaaagttcttggagaaaaagaacttatggaaatgaatgtacagactattaaagacgatgaaagcctgttctataaattagtggataaaaatttcctcttaatagtggattggagtggagaagatagacaaggaatgttgtataacttcttcaacaacagacttcaatcaatgttgggggtacaattggttgtgtccgaagatgaagtttatcaaaaatataatcaagaaatagaagaacccaaacgaggtgatttcattccatttgcgttatcctattttgataagcaattggaaaagcttggggcaagagttgtattgcttgacttagaaaatgacacttataacatattggtggcttataaaaaagatgccaaaaaactaaagtctataaaatctgatttttggaagttatcaactttagagcaaaagcaaggtcgagtggttatttccataacctgccctaattgtaaagattttgcatgttatgacatgttgattgaagaggaaagcaatatggcaaatgaaaagtgcgaagtatgtggaacactcttttgggatgaaaatgcaaatgaagttgtagaaatggaaaagacttattattaatgtagttgctaacaagcacctgtgccacttaacagtggcaagctgcaaaccattaacattataatcttcaaattatgcgattaaacagtaggagaataataatttatatcggaatagcaattttattgattataataattgctactcgctgtctggattttttcttcttttttaatgaggataatagaagatatacaataggcacgttttctgacataggatattatcgtggttcaatctgcaaatttaattacaaagtgggtgattcaatttatattgttgatacaaggtttggactacatgataaagatttgaaaaatctaagattggttgtcaaatattcaaataaatgggttgaacattcagagctacttttagaggttgttcctaaatgggtgcttgcaccacccaaaggcggatgggaacagttccctcctgacataaactggaaaggagctgaattagatactgcatatatgaagaagatgaatttggaaataccataatttgatgagaataaaaatagaatgttaacaaggtcgagataacagctaaacgctgttgctcaccaaaccattaacaaacatgaaaaggtcatttattctcacagaaatatctagcataggcatctgcctactgctgataagtcaaatgatgttccctgaaaccttcacgggagcatggttcaggtatgcaatacttgcactgatggctattacacttctatccacacaaaagggtgaacgtctgagggtgtacgacaggcagcggcaactgtgcctgactccgtttctgtggtgctactggtgggtggagaagatactgatagggattgccgtactgtgcctgtttatgagtgaatggaacgcgcagcccgccctgtcggttcttctgccatttcttatcggcatctacttgggactgaaagcggcggtgtatctgatagagtatgcggtacggcgttccccgcttagccattaatagtaacatgaatatgacaaaaaaagaaatttcagtacttgtcgtcaatgaaatgtctttcactccccaaaatagtaatggtattagtatgcttcattgtataactgatgaaggatattataaaatcacaaagggtgagatggatgaaaaagtttatatggaattaaatgatccttcaaatggagaatattttgatacggatttttttgaatataatatctcaaacggtagtttgttgatttatgtcaatgagaatagaccttggaatgctggtatatatcaacatatcaaactattgttttctccacttgaacaaaacgattttaacgaattaaaattgacgatagaaaatttattattcgatataacaataagaaaattattacttgatatataatatgtctaacaagtcaagacgcagctcttgtcaaactagactgggaatgcacagaatatttggatatttgttttacaagacagaccgttttgtccggcggacaagcatgggaatattcccatggtacgctacgggcgtgatcagccttgccctgacgctttacgtactcgatgcgtgtctgatttatgccgcagccacaagcggaaatccgctgccttttttcaaactctccatgccgatagtgtggtttgccccgcaaatctattattactacaggataaggtatctgaaaataaggcaagacaagtcgtatgaaaaatattccagcgtttgggctatcttgtttttgctgtttccatttgtctttttgattgtattcgcacttattggagatagattttacatgccatattaattttaatgtcattgaaatatggaacaacggatcacatcactgctgctatccgcttccaaagcggggctggaagcgtcctgcaaggaattggataacaaggtaacatggctgctgcacaacagccggaaaatggacaactacttggaacttgaaccgttcagcaaggacgggcgactgtgcgcccacgtgtgcgacacgctcaaaagcctgccggaaacgcccacactggcggcatacaaggactacaaggcaattatcatcttgctgggtatgtccaccacccattacgccatactggacgaactggcggaacaacaccgcaagcgggatgaaatatccgaactgaccgcctactgcgatgcgctccactggatgcggtcggggcgacagtacctctacaacgtgtacaacacggtatgctacgctttccacctgctgcggagaaacccggtgaggaacaaccgcctgctggtgacggaaaaggagctgcgccacgccgaacggatgctgcccgaactgggcaggcagacgttcaccgaaatggtgcgtctgaaaggctacaaggtctatgatgccgaagaactggcggagaaatgcagaatggaatacggctcgttccggcgaaaagtaaagcggctgacggggtacacggcaaagcagtgggtggtaaaggaacgggcaaaggacgtggaacactacctgaagaacaccaacctaacgcttacggaagtggcgttcaccaccgggtttgcatcgacatcgaacctgaacgacttctgcaaggcttacttgctggacacgccgggcgagatacgtagaaaagcgcaggaaacaagaaaatgcacagttacaagaacgtaatgtgaaaaatcaagaataaaacagattttttatgcccgtaactttgtgcttcataaaagataagcacaaggttatggaacataagataccgttggaaacatacttcgccggactgcttcaaaaagtggaatggcagatacaggaatacgaggacaccgcagcggacacgctgacgctctgccgcctgtgcgtggactacctacaagagatactgggcgaactcaaaaactttataatctcctacccgttcgccagcacggaagaggaaatacgcttcttcaaggaactgaaaccgcttttagcgagcaaaatcatctattacaacaccgtttacaagatagaggtacgtttccccagcggcagcgaggaagtgcaaagggactacctgctgtcggaaaccgaccggatttcaaagtcgttccagcggaacttggcgttctaccagtaccaccgaacgaaagccacctacttggacaggcagtatttcatgcgtgggaagcctgacatacaaatcatcgtggacagtttctattacgaaacagacccacagttcagcaccagtcacgatttcaaggtagccaagattttagccaacgaactgctggaaatatacctcaccaaccgtctgcacgagctggaacgccgggaacaacgcaagcgggtgaagaacggcttcatgggaaaggtgttgcgctggacggggacgaaaagggcgttggtggaacttatctacgcactggacgcctgcggctgtctgaacaaggggacggttgatattaaggagattgtagcctactttgaatacgtgttcgacatcgacctcggcgacttctaccacacctacatggaactaaaagccaagaccaaagaccgaacgggcttcctctccaccctgaaagacaggttgctgatgcgcatgagggagcaggattaggcaaccgtgctttaacaaaatttatttcgccacaggtgggtacatctgtggcgttttatttttcaggacacccgaactttgcggcaaatcaatcagttaccgttatggaaataataacattcgagtccaaagcctacaaggaactggacaacaagattaccgccattgccgattacatcttcaaccacatggaaacggcaaggcaaagcgaggaagacatgtgggtggacagctacgaggtctgcacgttcctgaaaataagcgaaaagaccctgcaacgcctgcgggtgtcggggactatcgcctattccaacatcaggggacgttacttctacaaggtcagcgagatacgccggatgctggaagaacgcctgataaggagcaacaaggagaacatcgacaacctgattaccaaccaccagttgtatgctaaagaaagaggaaatcttagaaagaacaagtaacgggctggcggtgttcaaacactacctgcccggcaactggcgcataggtcgtaacttccttaacccgctgtacgaggacagcaaggcttcctgcaacatctatttcgaccgccggggcggtatctacaagatgaaagacttcggcaacgacagttacagcggcgactgtttcttcctcgtggggcagttaaaggggctggactgcaaccgggcggctgacttcgtggagatactggaaatcatcgaccgggatttgggcttggggatggcttccggcactccggtttccgttcccccggcaaccgtccgccgggcagtgccggacaaagccgaagaaacgcccggaaagcccgtcaagccctaccagttccgggaacagaagttcccgcttgccgaactggtgtactggcaacaatacggcatcacgcccgaactgctggaacgttacaaggtctgctcgctccgggaatacaacagcgaaacggcagagggcaaaccgtacacctacacttcatcggtggcagaacccatgtacggctacaagggcaaacagcacatcaagctgtaccgcccgttctccacgccccgcttcctctacggcggcagcttcggcgaaaattactgtttcgggctggaacaactgccagccaaaggcgacacgctattcatcacgggcggcgagaaagacgtgctttcgctggcggcgcacgattttcacgctatctgcttcaacagcgaaacggtgacgataccgcccacgctggtctatcggctgacattccggttcaagcacatcgtcctgctctttgacatggacaagacgggcagggaaagttcatgcaagcaggaaaaactgttggaagaatttggcgtgaaacgcctactgctgccgcttccgggaacgaaagaggaaaaggacatatccgactacttcaaagccgggaacacccgtgaggatttcctgaaactgtttatcgaatttttagacaacctgtatagcgacacattgattatgcttaaatcgtgcgagatagatttcaacaacccgcccgccaaagcgcaagagattatttcggcgggtgacgttccgctggggacacaaggcaacctgttcggcatcaccgggggcgagggaacgggcaagagcaattatgtagccgcaatcgtggcgggctgcatctgtccggctggtgcggacatagatacactgggcatacagataaccgccaacggcaggcacaaggcggtattgctttatgacaccgaacagtcggaagtgcaactgttcaagaacgtaagcaacctgctggcacgtgccaaacagccggacaagcccgatgaactgaaagcgttttgtcttaccggcatgtcacgcaaagaacgcctgaacgccattgtacaaagcatggacaagttctactaccagtacggcggcatccagttggtcgtcattgacggcatcgcagaccttgttaagagtgccaacgatgaagcggaaagcgtggcggtgatagatgaactttatcggctggcgggtatctacaacacgtgtattctgtgcgtgctgcacttcgtccccaacggattgaaactgcggggacatttgggcagcgagttgcagcgcaaggcggctactatcctgtccattgagaaagacgaagaacctacccagtcggtggtgaaagcattgaaagtaagggacggtagcccgctggacgtgccgctgatgctctttgcttggaacaaggaagccgggatgcacgtgtacaagggcgagaaaccacgtgaggaaaaggagaagcgcaaggaaagggaactggtgaatgtcgcacgtgacatcttcgggcggcagacacgcatcacctacatagacctttgcgagcagttgcagcaggtcttggacatcaaggagcgcaccgcaaagagctatatccgcttcatgcgggaaagggacatcatcaccaaagacacggcgaaccaaagctgttttgtcatcggttcatataatcttcaaaggaacgcaagttgtccataagcgtatggatgaaacttgtgtaattcatgtgcttgtgtcctgccctgttgtgataacacggcaggattttttctgtttacacgtgattttttcagggtatttgcttaactttgcagaagttacacggaaaagtaacggcagttggacggcggttgccggaatattgcctttatatataacatatacgttcgccgaacgtcccgatgcgaaaactggcacttttcaaaatgtggggatattcagcgcaggatatgctatgcgtttgtcatagcgtggctgcactgtttccacatttaggtatgccagtacctcgcatcgaaacagcgtcatgccacgctttctttttttttgggggggcggctaacgtgccaagacagtagggatttatatcactttaatacctgataatatggaacaaatcaaagcgcacatcgccgtatcgctggacgggcataccgccacgccggactatgaactggactggatgccccgtgaggtcaaggaactggcggcaagggaacacgccgccgcaagctgcctgcttatgggggcgaacacctacaactacatctttgaacactggggcgggtggccgcacaaaagcaaacggtcttttgtggtgtcacactacgacaccaacgttacaccggactgcggggtggagttcctgaccgaagaaccgctgcaaagggtctatgaactgaaacaggaaaccgacatgctggtggtgggcggcggcaagctgcttacttcattgattaaagccggactgctggacagcctgacaatctacaccgtcccggtcatggcgggcaaaggcatcggctttatcggggaaacatccggctcgctgtggaagctctcggaaagcagggtgctggataacggggtggtctgttcgacctacctgtttggcgggaacatataaaaaatgcgcccggtttccctccgggcgcaaccactaaaatttcaattattataagctgtaaaacctatcacaatgaaatttcagcggcaaagataggctatttcttcggtttcgctttcttttcggggaatgaaaaaccgacattgaactgctcgtccagtaccagcgaagcatcgaaagccttgccgttcttgcccttgaaccccttgattagcccggtcttgcgttttgtcgccagctcgacaatctgcttgtcggaaagctgcttgtcgcacttgttgcggaatatggtaagcgtgcagtccacgttggaacacttcgccactttcgggtagaacaggatgcgcccgctgccgcatttcgggcaggggcaggtttcaccagtagcgacagatagctgcaccgatagcagttctgcggtgatttgcgttgcgtacacctcgatgcccttccggaacgtgtcggcatccatgctgcccgcttctatcttggcaagggcggtttcccacatgcccgtcatttcgacatcggcaatcttcttgtccctgacaatcccataaacggcaagccccttgtcggtaggcacaaggttcttcttctcacgcacgatgtactgacgggcgaacagcgtttcgataatcgccgcacgggtggcgggcgtgcctatcccggcatctttcaggctggctttcagttcggcatcttccagttccctgcctgcgttctccattgccgacaacaggctgctttccgtgtgcagcggtttcggcttggtctgcttttcgagcagatccacgccggagagtggcaaacattctccctcttggagtggcggcaggctggcggcttcttcatccccgcccgtttcctgctcgccgaacacggcacgccacccggcttctttcatcacagaccctttcaccgtgaagtcggtatctccccctgacagcaaggcggtggtaacgtctttcacgcacttgcccgaaaaggcttccagcatacgcccggctaccagctcgtaaaccgcccgctcgtctttggaaagttcgccgggcaggttctcggtaatgattaaggcgtggtggtcggtcactttgccgtcattcacgctgcggcggttcaggggtgtgccgtccagcccggcggcatacccggcaaagcgggagtattgccccagcagggcgacacgttccggcatttcatcgaaaacgtcctccggaatatagcggcttccggttctcgggtaggacatcactttcttttcatacaggctttgcgctatggaaagcgtcttgtcagccgagaagttcagcttcgtgttcgcttccttttgcagcgtggtaaggtcgtacaaaagcggcggttcttggcaggcttctttcctctcaacggatttaaccacaagttgcccggcatcctttacccgttgcagggcggctatggcttcgggctgccgttcccacttggcggtcgattgggcggtaaaatttattcccccgctggcggtatcggctttgagttgccaaaacttggcgggtacgaaattcttgttctccaaatagcggctgcatatcatcacgagcgtgggtgtctgtaccctgcccagcgagaacaccccctgcccggctgccacgctcaacgcttgggtggcgtttatccctatcagccagtccgcttcgctgcgggacttggcagagaggtagaggttatcgtaacgctctcccggctgcaagttatccagcccctcacggattgccttgtcggtaaggctgcttatccacaggcgcacaaatggtttccggcagttcaggtaatggaagatatagcggaagattaactcaccctcacgtccggcatcggtggcgacaataatccggtcgcactggtcgaacacttcctttatcactttcaactgtttcagcacgccggggtctgccttgtaccctttctccgctttcacctgacgggggattagctggaaatcgggcggcagtatgggcaggctctcccggcggaagttcgccacgccgtaagcttccggcatggcaagctggattaagtggccgaacgcccatgtcaccatatacccgttgccggaaagataaccgtcattacgcccggtcgcaccgatgatgcgggcgatgtcctttgccacgctgggcttttctgctatcaatgcaatcataattctttactttttaatggtggatattacattttcattcctctggacttcttgggcttgtcagctttcaggctcttgtcctgcgctttctcctgcttctctttctgcttggcggtgggcttgtcctgaccctgtttcaacggctctttgccctgcttggtggcttcgttggtcttgcccccggaattgaccgctacctgcgtccggctctcggcggcgggggtaacgtctttcggctgcaccttgtcgggggatttgccctgtgcgccggactgtacatgaccgttgaactcaacgcccttgccgtcctttaacccggctacctgctgctctccgggctgctgtccctgctgcaagaactggacggcagacctcggcaggaactccaagccacgctccaccgcactgacctgcaaataggcactgcgcttcgtgccgtccctgaattgcaggttttccattttcaccgcttgcccggcttcaaaggcggctttctgttccgggctgacttgtacgttacagattgtatcggggcatttccacttgtcagcccgcatatactccagctcgtgcgtgtacctgtcccggctgacgaacacggggatttgctcgccgcttttcgggtctttgatttcagcgatgccgcccaagttgccagtgccttgcaagttgtcctgttcctgcttggtgaactcgtgttcatggaacgggcgttgcaacagtttttcgtcctgctgcacgccgtgtagcttgggtactaccgtgccgtcctttgcctgatagaaagagagcttgacatcggtaggtttgaggtagaagccgcccaccgtccccgaaacagtgtaagtgttgcgagacttgtagccacgcatcacccggtcgaagtccctcgtgtttttcagggtgtcggcggtgatgccgacttttttcaggttctcccagtcgatttttgccgggtcgaagcggtagccctgcttgaactcgtggaagtcgggcttcggaactcgaagcatttcagcccgcttgtcaccctccggtgtagggttgcggtggttgtcctcgattgcctttgcgtcccgctccgcttcggaagccttgacgctgaacagttccagcccggaagtgtcctgatacttgcggtagaagttggaaatgaagttgctgaacacatcgctgttcttgtccacctgcatgaactcgccgccgtgtccggtagtgggtggcacggtctgcaaattgccgtccttgtcgatacccttaacggcactcacctttccctgctgtttatccaagaccagcagcacgtctttttcctgcccctctgcgggcggggtcattctgtttgccataaataattggaattttagtggttacgggaatagtcccgcccaaaggtagcgactaaatatgctatatttggacgggcggcaaggactgtccaaatttgtcctgcgttgtctgaaattgtccgggtggagtaaatctccaactgacggttggagaattggaaacaggcataaaaaagagagcgaagttaatcactctcttggggtgagccatttatgagccatttaatcataaaccttatgccttataatcaacaacttattaaaatttacattatgcttgcgagccatttgtgaagcgtttgtgaagcgtttgtgaaacgtttatggaacgtttgctattttatcaatagactaataatgagctacatatcaaaattaatactgaaatacagcttatttttggaacgtttgtgaagcgtttggcaagcctttgattgagtttccgttattctcctattatcaggtgacacgacaaaaagaaaacatcttcggcaaaatctttgttatgtttttgcaggtgattacataatatactatctttgcagatagaaacaaaggacataaatatggcttcattcaggaaagagatacttgggcagattgaacggatagataccgggcgtatattcacgttccgggatttgtcgtttgaaatggaaaagactgccaatgttgcggtgctactttccgaacagagccgcaaaggggtactggtacgggttgaaaagggggcgtactaccgtcccaagaaatcagtgctggggctgggaaagctgcctgtctatcaggatgaacagttccgctacctgactgaaaaactgaacggctatatcacgggggcttacatctataacaaaatggggctgaccgaacaggttgccacaaccataacgatagccactcctaacccggttcgccgtttccgtttcaagaacttggatatagagtgcgtgaaagcctactgcatggactacccggatgaaagccttgtcccgtacttgcggctgctcgatgcgataaaggacatgaagcgcatacccggaacaaccgggcaggacatctacaaccgggtcaaaagccaatattttaacgggtacagcctgccggaactggaaaaaatcgtatctttggcgaaaagttacccgccacgtgtcagaaaggtggtggcggacatattgggcgacatcagacaaaccgtattgcaaacagaaatggcaaagaccattcttcccacgacacggttcaacttggattataaaacggcataggacagaaatatgaatttacattcggacaaggaagcgttcaaggaaatcatcgcactggcggctgaacatttcagctacgagcagtcgcacgtggaaaaggattactgggtatcgaagatactgcgggatatttccatgtccgaatatgcggataagacctacttcaaaggcggaacttcactttccaaagcctacgggctgatagaacgtttctcggaagatttggacttgttcgtgttcacgggtgataaaggtgcgtccaagcaggcggaaaagacattgaacaagaaactttccaaatacatagccgaactcaacagtgacatatacaaggaagatttgtcggaaacgggcggtaattaccgtaaactgtatttctcgtatgacaatgtatttcaaggcgtgggacttaaagagcatttggaagtagagataaaatcctgtgacctgccggacaaaaaactgatgttctacccggcggacaagcgggttatcaaaccgattgtgaccgcctttcttgaaagcatcgggcaagaggaactgataagcacctacgggctgggaagttttgaaacgcaatgtatcaacccccgaaagactatatgcgacaaggtttcaaggctggtaaagctgtcttacaatgaggatgcagccgcactgttggcaaagcatatccgtgacgtttacgacttgtcggcactctaccacaatcaggaatataacgattacctacattcggaagatttcttggatgccatgtaccgggtgacgatagaggacggactaaataaaaactcccgttcgcacttgtcgctggctgatgcaccgatattcaaggatgccgaagcggtcatggcgttgcccgaagtggctacggcgtacactaccgatttgaagaaactgactttcgacaaaagcaagatgccgccgataggcaaagctgtggaagcattgaagaacctgcacgaaatattagtgcgttttgaagcctaccgcaccaaaaagcaaaatgaagaacaaccgtaaagctacatcggctgttcttcactccatacattattatatacagctattcttcctccttaatcaagtggcatagctccgggtcgttcttaatccgggttatttcgtcctcgactatctgccggacttcctgccggatgcggtcatagttggcttgtatctcctcctgcatccggtcgttgccgtccttgtcggtgaagtcgataatctgcggcaacttcacgtaacgggcggtttcccgcttcaccttttcattatccaccacgatttcacagtggaaaatcttctgctctatccgttcatcgaagttgtccgccaccgcacccacgaacataccttgcgtgaggttggatattttactggcgggtatcaggctgtccatttgggtgcttatcgaggtggatttctcccgttggttgattgtcatgctctgccttttctgcaacacctttccgaagcgttctgaaaggatttttgccgtttcaccgactacctgaccgctgaacacgttacccaccgtattttgtatcacacggctttccttgtccccgtaatcacgggtaagctggctgtaatcttgaaagcccagcagaaccgcaaccttgttgcttcgggcggtggcaatcaaattatcaagcccacgaaaatatatagtcggtaattcatctattatcaccgaacttttaagctgacctttcttgtttatcagcttcactattctactgttatataatcccagtgccgccgaatagatgttctgacggtcgggattgttgccgacaaccaagattttaggctctttcgggttgttgatgtccagcgagaaatcatcacctgtcattacccagtaaagagcgggtgaaatcatccttgaaagcgggattttcgcacttgctatttgaccctgcaactgctcttgagcgtctgattcccaagcatccacgaacggggaaaggtagttttccagttcgggataactgcgcaaaatagtgaatacatcggcgtatttcttgttcaatagttcaatggcatgggggaacgtgcaatacctgccgccctgataaatgcgcaagtaccaaataatggctgccaaaagaataatcggactttccacgaagaaatcgccctgcttgcttatccaacttcgattgaggttaagcataatcgtgtagctggcttcgtaggcatccgcaatgtccgacatgaagctggcgtttatcgggttgcatcggtggctcttgcgtgggtcgtcaaaattgataatgtagaatttaggctttaccttatacccgtccaagtggttaagcaaatgattataagcgatttccgataaatcgggaaacttataatcatagcagtaaagcgcaaaacctttctcgatttgctgttttatgtagctgtttaccacggcatacgacttaccgctgcccggtgtccccaacacaaggctggcacggaacgggttcacgacatttatccagccattattccatttcttcttatagtagaaccgggtaggcagatttaccgaatactcgttctcgataagccttgtttcctgcatgaaactctcgttctctgtattaaagacatcatccattaggttgttcttcaacagccgggacatccatgtacccgccatgagcatacagatatagcccaccgacagcgtggcgatataaaacacggcatccgccgtgtgtggcagcggaagttccagcaaccaccagttcaggaaaaacaacacgacacccgccgcaaggctgcaatgtatcttcgcccacgttatcttttcctctttcacgcccttagtgccgatacacgacagggcgaggaacaccaccgaaaatagttttgtccaaagaacggacgagaacagcccggtggtgcgctggaagttccacagtatcttgtctatcacttcaaacgtcactccccactctttcagggtggagtaacagaaccagtacacgtttattcccacgaatagaatactgacagcccgcataaagtccatgacccttgcaagccctctcaaatcatcttcctgttgcatgattgtaatgttttttaagttagtcgatgcgccttgtgcgcttctttttcttctttctcttttggcgggcggtgtcctgcggctcgtcaccgactgatgcaccgccgcccagcaaaccgccgaaagcacccagcacggaagccacgcccgaaacgatgtcggcttccggcgtgaagcccggctgttcctgatgcgtggattgttcccgctgttgtgttttcacttctgactggtgtatatttccggtttcacccgaaaaacgttcgttgaacacgttcgccgaatactccttgcccaagcgtgaaccgttcagcaccacccggctgtcgtggtcgatgaacgtaacgccgtagatgcgcccgctgtcattctgacggaataccacgtcaatgccctgcttctttagctgttgttccagttccttgcggctgcgggcggtctgcatggcagtggctacaatcttccgggtgcgctctttcagtttcttgttcctgattgcttcgcccgatttctccattctgcgccgcaccgcttcataacccaccgacttgccgatgcgggaagcctttaccgggttgcctgtcttttcgcccttgtcgttcatggcggaatagacaatgccctgatagggcttgccgtttatctcgcctttgacttcctcggcgcacacgttgtaagcggcaagcaaagccttgtactccccgaacgactgaaaacgatagccatagcaagccgctttcacggtattgccgatttggtgcttcacgtccccggcggcatagtccacctttttaagttccgggcgttcggcacgctcctttcgctctgctgggtgcagcccgtatttcttttccagttcacgggtgatttgcttgctgcgccgatgctcgaacctgtcattcagcggcttgccgttctcgtccacccgcaaccccacgatgtggatgtggtggcggtcgatgtcggtatgcttgtacaccaaatagggctggtcgccatagcccaacttccgcatatactctttggcaatgtcggaaagctgctggtcggtcagcacgtcttccgggtgcgggtttatggaaatatgaagtatcggcttcttggtggatagctggacgggcatctgcatttcaaagctgcgcatacacccgccgatagagaaattcccgtcctcgcccaacagcattttgttggagaaaagcacctttgcttccccgctgtccaccttgttttggttgtacgccagtgcgccgaacatattgccgcccgtgcttattttggcaaccatagttccttgcacttgtttgtcaggtcgataacctgacggtttaacatagataattcagtggtcgctctctccagtttatagagaaaagccagtgcctttttctccgaaaagttgctgtgcaacgcctttacaacttggttgtaattgaccgccacggctctgaattgtgcataaaattcggtcagccgggcgcaatattctactgccgatttgtccactttcaccacccggaacggctcgccgaacaaccgggcggcgatgaaacgggacttgctcgtgacgcccgactgctcccactgcgagaggaagcgggcgttctcccggtcgttcaggtaaaggacatggcgatgcttcgccgggtctgcgagggcggggcgaccgcccttgttaggttttcttgtttccatgcttctttggattaaaaaaattacgacttcggagtgatttttacccccgcaaggggcaaggcgttttcaggcacggaaaacggttttgtagcatacaaaacacaccttgctattttctgacgaaaatcgaaatccgtcatggacggattggggttagcgtggaacggtaagccctgccattcaccagcccggttttacacctgctcccccctgcggttcgttactccgctgcaaagtaacggtgatttataatgctgtaaaataggcggttggtggacaaagcgggacagcgcaggacaaatcgggacaaggttttcaggggacgttttttctccttttttttgcatcggatttcaagattgaaagaaatattccaatcaggaaagaatgattgaaagcatgattgcaataaaacgtgattgcaggatttcaatatttcaagaaagaatgaaagcaggaaaacaagattgaaataaaacattctttcaatatttcaagattgcaacatggaaagaatgaatgattggaagcaataaataaatctatcaaccaataatgaacggaagcaatatggaaaacgagaaaacgcccctttatgtcgccttttccacccaaaagggcggggtcggcaaaaccacctttaccgtgctggcggcgagttacctctactacctcaaaggctacgatgtggcggtggtcgattgcgactacccgcaacattccattgccgggatgcgaaagcgggatgccgagcaggtcggggcggatgaagattacaagcgcatggcgtatgaacagttcacccggctgggaaagaaagcctacccggtattgtgcagttcacctgaaaaggcgattgcaacggctgacggatatatagccgccggacacgtgccggatatagtgtttttcgacctgcccggcacggtgaacagcgagggcgtgataaactcccttgcgggcatggactacattttcacccccatttcagccgacaaggtggtgctggaaagcagcctgtctttcgcaatggctatccaaaagctattggtgaggaatgaagcctgccgacttgccgggctgtatctcttttggaacatggtggacggacgggagaaaacagacctttacaccgcctatgacaagaccattaaggaactggaactgccgctgatgaaaacctttatccccgataccaaacgctacaaaaaggaactggtagcggataaaaaggcggtgttccgctccacgctctttcccgccagccgcccgctggtaaggggaagcaacttggaagaactgataaccgaaatagtgtactacatcaaattaaaatgatatggcaaaacaaagcggcgggatgccgaagatagacgaggatttcatgaaagagcttatatcgcagggtgttcccagtaaagaagataataaaccgaatgatgcaccacataccaatcttgcatcacaagttacccaagaggaacagcagacggaaacggtgcgggtggagaaaacgacaaaccgcaagcgcaagggcggttcgggcgactaccgggaaacctactttcagaaagtagaactggcagaccgacagcccttgtacgtgagccgtaccacgcacgaaaagctgatgcgtatcgtaacagtgataggcgggcgcaaggtgacggtaagcagctacgtggaaaacattctgctgcggcacttcgagcagtaccaagacgagataaacaccctgtacgaaagccacttccaaaagcctgtctgactatgataatctattgcatacttaccgggcttttggtgtactatatcgccctgtggctgtggtatcgctacacggacagccggacatcaccgggcagaacggatgatgcgccactcccacgaaacgaggtttcgggctacacgctgataggtgaaagccgatacaagggcggactaatcgggacagcgcaggacaaatcgggacacctccagcaagcggctgaaaatgatactatttttgcgccgcaggctgacggacagccggaagaaaacattccggaagcagcagccgaagcggaagaaacgcccggttacgagaatgacgaacccgactacgaggacgaggaaatagccgggtacatggacggtgacgatgataccgggcgggctacgggcgtgagctttgacgaactgggcgaagcggtacgcacggcgaacgccgacaaccccaccgaagcggagaaacggcaagccaccgggacactggcaagcattgaggggacgaacctctacgatgcggtggtggagaacatcaacggcgggctggcaaaggtggcggaactgctgggacgcaacgaagcggaactggctacggctgctgtccctgccggaactggcaatacaagcgaggaacacgaagcgttcgacatgaacgatttcctataatataataatgtataagcctgacagcatgaaacaacgggattacggttgattggcaacctgaaaaccaaacagacaaacgggactatccccgaccactaaaatttcaaattattcaccagccgggaaaggcggactatccacccgccgcccggcattaaaaacaaatcacaatgagaaagaaaatcttcttgtcggcggctatacttgccgccgtggtaagtgcctacgcacaaggaaacgggcaggcgggcatcaccgaagccacgaacctaatcaccgggtattttgaccccggaacaaaactggtgtacgcaatcggggcggtctgcggcttgattggcggggtaaaagtatataacaagttttcaagcggcgaccccgacacctcaaagaccgccgccagttggttcggggcgtgcatcttcctgattgtcgccgccactatcctgcgttcgttcttcctctaaaaaggcggctatgtctgacgagttgttgagggctaagcccgaaaaatatccggtaaacaggggtatcggaaagccggtggagttcaaggggctgaaaagccagtacctctttatcttttgcggcggcttgctcgccgtcttcgtggtgttcatcgtcctgttcatggcaggcgtgaaccagtggatatgtatcggtttcatcgtgtcagcttcgctgctgctcgtgtggcagacgttccggctcaacgcacggtacggcacgcacgggctgatgaaagccgccgcacgcaaacggcatccacgcttcattatcagccgaaaggcgataccccgattattcacctacaaaaaaagaaaggaagaaagactatgaggaatatgttaaaggctaccacgctggaaaggaaatttccccttttggcggtggagaacggctgcatcatatcaaaggatgcagacatcacggtggctttcagggtggaactgcccgaactgttcaccgtcaccagtgccgagtacgaaaccatacattcggcgtggtacaaggcggtcaaggtgctgcccgactactccatagtacacaagcaggacttcttcatcaaggagaactaccagcccgacaccgaaagggacgagcttagttttttaagccgatcctttgaacggcacttcaatgaacgcccgttcctgaaccattactgctacctgttcctgacaaagacgacaagggagagaagccgccgacagagcgacttctccaccctatgccggggcaggattgtaccgcaggagatagccgacaaggaagcggcggcaaagttcatcgaagcggtcgggcagtttgaaaggattatgaacgacagcggttttgtcacccttacccggctggcggcatcggaaatcaccgggcaggacggaaaggcgggcatcatcgagaaatacttctcgctatcgcagacagataccacctgcctgaaagacatcgggctgtacccggaagaaatgcgtgtcggggacgatatactgtgcctgcacacgctttcggacgtggaagatttgcccggaaaggtcgggacggactgccgatttgagaagctgtccacagacagaagcgattgcaggttaagttttgccgccccggtgggcgtgctgttgtcgtgtaaccacgtctataaccagttcatcttcatagacgaccacgccgaaaacctgaagaacttcgagcagaccgcccggaacatgcaatcgctctcccgttactcccgtgccaaccaagtgaacaaggaatggatagacgagtacctgaacgaagcgcacagcaaggggcttatttcggtacgctgccactgcaacgtcatggcatggagtgacgatagggacgaactcaaacgcatacgcaacgatgtgggaagccagcttgccttaatggagtgcaagccacgccacaacacggtcgatacgcccacgctcttttgggcgggcatacccggcaacgaagccgacttcccggcagaggaaagtttctacacgttcttggggcaggctctatgcctgttcgtggaagaaacgaactacaagagttcgctttcgccgttcggcatcaaaatggtggacagggtaagcgggcgaccgctgcacatcgacatttcagacctgcccatgaagaaaggcatcacgaccaatcgcaacaagttcatacttgggccgagcgggtcgggtaagtctttcttcaccaaccacatggtgcgccagtattacgagcagggggcgcacgtgctgctggtcgatacgggtaacagctacttggggctgtcccagcttatccacaaccgtacacacggagaggacgggatttatttcacctacaccaacgagaacccgatagccttcaacccgttctatgtcgaggacggggtatttgacatcgagaagaaagagagcatcaagaccctgatactcaccctgtggaagcgggacgatgaagccccgaaacggtcggaagaagtggcgttgtcaaacgccgtgagtgcctatatcgaactgataggcaaagaccgttcggtaacgccctgcttcaacacgttctacgagtttgtcagggatgattaccgccgacagcttgaacagaaaaacgtcagggaaaaggattttgacattgacaatttcctgaacgtgcttgaaccgtactatcgtggcggtgagtacgactacctgctgaactccgacaaggaactggatttgctgcataaacgcttcattgtctttgagttggataacatcaaagaccacaagattttattcccggtaacgactatcatcatcatggaagcctttataaacaagatgcgcaagttaaagggaataaggaagttaatactaatcgaggaagcgtggaaagcgattgcatcggcgaacatggcggattatattcgctacctctgtgcgcccgtacaagctgcttagtaaatatcccactggcaagggattaggtaagtgttctttgaaaaacctatcatcacccgacttatccgaaagggaaaccggacggggagtgtagcatgtcgggaacgtcgtaagtcagtcagttaccagactgccactgaacggcaagatgaaacgatggatatgaggatgaaaaccgaattgtttgaacgacagtccgagctgctctacttgaaggctatgacgtaaggtaactgaaatcgtcatactgcggtactgctccggtgtataggtacggacgcaagcaagaacttgccgcagagcaaccatgataaatggtaaaggacggaaatcgcatccgacaatccatcatgccaacagttactaagtaagtaaacggggattacctaaaccggaacgccgtaaggctatgaggtgcagacctctgaatatccggcacggtaacggagcctccgtagtagtccgggcagggtaacgccctgcacatggcgaagggaggcagctaattttctttaatacaatttaatggataatgtgagagacattatgagaagtccggaaagagtattaaacagtctgaacgaacacagtaaggattcgagctacaagttcgaacgcctttaccggattctgttcaacgaagagttgttctatgttgcctaccaaaagatcgcatcgaacggaggcagtacgaccaaaggctccgacggtcgcagtatcgacgagatgagccttgcccggatcgaaacgctgatagcctcgttgaaagacgaaagttatcagcctcacccgtcgcggagggtgcatatcccgaagaaaaacgggaaaacgcgccctctgggaataccggcttttgaagacaagctggtgcaggaggtagtccgcatgattctggaagccatttacgagggacattttgagaccacctcgcacggtttccgacctaaacggagctgtcacactgcattacttcatattcaaaagacgttcagcggggcgaaatggtttatcgagggcgacatcaaagggttcttcgacaacattgaccatgatgtacttgtcggaatcctgcgggagcgcatttcagatgaccgttttatccgtctgatacggaaattcctgaaagcgggatacgtcgaggattggacgtttcacaacacttacagcggaatgccgcagggaggtatcgtcagcccgattctggcgaatatatacctcgataaattagacaagtacgtgaaagagtatatccgacatttcgacatgggaaccaaacgcaggccgggcaaagagagcaacgatttggccaatgaacgaaaacggactgtgcggaaactgaaaaagataaaagacgggactgagaaggcggctttggtcgcaagactcaaagccatcgaacaggaacgtgcagcatttccaagcggagatgaaatggacggaagttaccgcaggctcaaatacatccgttacgccgacgattttattctgggtgtaatcggtagcaaagaggatgcactgcggataaaggaggatattaaatcattcctatccgaaagcctcgccctcgaactgtccgaagaaaagacgctgataacccatacgggtaaatcggcgaaatttctcggatatgagattacggtaacacggaacaatcatcaacgacgggatgtgcaaggacgtctgcgacgcacctacggcaagcgtgtccggctgaatgtcagcatggcaacgctgcgggacaaacttctggaatacggagctatggaaatcaagctccgcaacgggaaagagatttggaaacccaaatgccgttcaggattgatattcaacgacgatcttgaaatcctcgaccgatacaatcgggaaacagtgggattttgcaactattacctgatcgccaacaactgcgtcgtactgcacaacttcagatatatcatggagtacagcatgtataaaacatttgcgggcaaatataggagcacggtacgaaaaatcaacaaaaagtaccgtctcaacaaactgttcaccgtaaagtacgagcagaaaggggtaatcaagtcccgaaccttttacaagacaagtttcaaacgccggacaacggcgttcaacggaagctgcgacatcgaaccgtactctattgcagacgtgagccgaaccaatttgacggacaggctcaaagcggaaaaatgcgaattgtgtggggcaacgggcaagctgattatgcaccatgtccgcaacctcaaagacctgaaagggaaagagagttggaaacggctcatgtcagcccgaaaacgcaagaccattgcgttgtgtccgagttgccacaggctgcggcatctgggaaaagtttagactgaaaaaaaattagtggagagccggatacgccgagaggtgtaagtccggttcgggggcgagttcttggaaacctgccgtagaaatacggtaaggcgccgggtgcttagcctacacaaaacagtccggaagtatttcggggaagcgattgtggtcacacaagagattgaggatattatttcttcccctatcgtgaaagagagtatcatcaacaactcggactgcaaaatattgttagaccaaaggaaatatctcaacaagttcgacagcatacaaaacctgctggggctgaccgataaggagcgttcgcagatattgtctatcaacatggcgaaccacctcggacggaagtacaaggaagttttcttctcgctgggcggcacacaatcggcggtgtacgctaccgaagtttcattggaagaatattacacgttcacgacagaggaaagcgagaaaatggaactgttcgccctcgccgacaagctgggcggcaaccttgaactggctatcaagcggcttgcggaaagcaaacgcaatccccaatcatcaacaacttaaaaattaggaacatgaagaaaacaattctccttttggcggtatgcctttgcttcatcggcaaggcatccgcacagtgggtggtgtcagaccccggcaacttggcacagggcatcatcaacaccaccaagcagatagtgcagacttccaccactgccaagaacacgctggacggcttcatggaagcgcagaagattttccagcagggtaaaaaatattacgatgcgctcaaagcggtacacgatgttgtcaagggcggcatcaaggtgaagaagtccattgagctggtggcggaaatatccgaaatctacgtgcgaaactatcagaacatgctggcagacccgaactacacgccggatgaactcaccgccatttcagccgggtacgccaagctgctctccgaaagtgcggacgtgttgcaggacttgaagaatgtagtgaacgtgacgggcatgtcgctgacggatgccgaaaggctggcggtaatcaacaacgcctataaaagcctgctcaactaccgcaacctcgtgaactactacacccgaaagaacatatccgtgtcctacctgcgggcgaagaagaagaacgacaccgaccgggtgctggctctctacggctcggcggatgaacgctactggtaacgtataaatatggtatgcctatgttattagcagcggtggattttgacaacctgcaccaagtgttgcgggtgctgtacgatgaaatgatgcccttgtgcagtaacatgacaggggtagccaaagggatagccgggctgggagctttgttctatgtagccgccaaagtgtggcagtcgctcgcacgtgccgaacccatagacgtgtacccgctcctgcgtccctttgcgttggggctgtgcatcatgttttttccaactttcgtgctggggactatcaacacggtattgtcgccagtggtaaaagggtgcaaccagcttatggaaacgcagactttcgacatgaacgagtaccgggcgcagaaagaccgactggaatatgaagccctgatgcgaagccccgaaacggcttaccttgcatcggacgaggaatttgaccgacaactggaagaactgggctggtcaccctccgacatggtgactatgacgggtatgtacatggacaggacggcttataatataaagaagtccgtccgggactggttcagggagttattggaaatgctctttcaggcggcggggctgattatagacacgctgcgcacgttcttcctaatcgtgttaagcatactgggtccgctggcgtttgcgatttccgtctatgacggtttccaaagcacgctgacccggtggatttcacgctatatctccatttacctgtggctgcccgtgtcggacttgttcagcagcgtgctggcacgcatacaaaccctgatgctccaaaaagacatcgagcagctttcagacccgaatttcatcccggacgggagcagcaccgtgtatataatctttatgattatcggcatcgtgggctacttcaccattccaacggtggcaagctggatagtgtcggctggcggtacgtctgcctataaccgcaacgtggcacgggccggttcaatcgccggggctgcggtcggtgcggcaagcgggaaagtaaccgggaaactactcaaataaccaacatcaaaatttagtatatggaatttaagtcattaacgaacatcgaaacgagtttccggcaaatccggctctttgcgctggtattcatctgcctgtgcgcactggtgacgggctttgccgtgtggaactcgtacagcttcgccgagaagcagcggcagaagatatacgtcctcgacaacggcaaaagcctgatgctggcactctcgcaggacatggcacaaaacagacccgtggaagcgaagtcgcacgtgcggcgtttccacgaacttttcttcaccttatcacccgaaaagggggctatcgaaagcaacatcaaacgttcgttgtttctcgccgacaagaccgctttcaactattacaaggacttggcggaaaagggctactacaaccgggtgatttccggaaacgtcacgcagacggtggagattgacagcgtgaagtgcgacttcgaccagtacccctacaaggtgaacacgtatgcccgccagttgattgtccgggaaagcagcctgacggtgcgaagccttgtgacctcgtgccggttgcttaacgccacacggagcgacaacaacccgcacggcttcatcatcgaagcgttcaccattaccgagaacaaggatttgcagaccattaaaagatagccttatggagagaaaacgaaattacatcgaaaaggtgcaggactgggcggacgaccgcctgcgccggatgtgcggacggattacgccgggcaaaaggctggcggttatcctcgtgatgttcttctttttcggcggcttgtctatctacatcaccgtttcatcaatatacaatatcgggaaacgggacgggcaaaggctgcaaatagaacacatcaggcaactgccgttgcacggcaatgacacaaccaaaaatatcaacccgttaaacagaccgcaatatggaagaagtacagaagaatgagaacggcacgaccgtaccgcaggcggacgggaagccgaaaaaggaagacaagcccaaacgggaacttaccccgcagcaggtgcagcagcgcaggaaaatgatagtcttcccgctgatgttccttgcctttgcagggtgcatgtacctgatattcgcaccctccggcaaagaggacgtgaatgtggaaagcgtgggcggcttcaatgccgacatacccctgcccgcagaggacgggattatagccgacaagcaaaaggcttacgagcaggcggtgataagccgcaaacagcaggacaagatacaatccttgcaggacttcggtttcacgctggacgatgatacggaagaaccacaagaggaaatcaatctgatgccggaagaagatccgaagccacaaaggggcggcggtacttcttcacgggcggcttaccgggacatcaaccgccagttaagcacgttctacgaaacgccccctgtggacgaggaaaaagaggaattgaaacggcaggtggcggaactgaccgactgactgaaacaacagcagaacgccacgcctacggctgacgaccaaatggctctcttggaaaagtcctacgagctggcggcaaggtacatgaacggcgggcagggacaagtcgcacaagtcccggtaacgggcggcattgaacgcaagccggatgcggtggcggtgcaggctatccgggaaacgaccgtttcgggattgcagcagcccatgagcgatgccgacttcatccgggcttacagccagccacgaaactacggcttcaacacggcggtaggcacgggctacgctatgggaaagaacacggtagccgcctgcatccaccaagaccaaacgctggtggacgggcaggcggtgaaactacggctgctcgaacccatgcaggcgggaaatatcgttgtaccgaagaataccctcgtggcggggacggcaaaggtgcagggcgaacggctcgacatactggtgtcctcgattgagtacgctggcaacatcatcccggtggaactcgccgtgttcgacacggacgggcaaaaggggctttccgtaccgtcctctatggagcaggaagcgttcaacgaagctatggcgaatatcggaagcgggctgggtacaagcatttcctttgcccaaagtgccgggcagcaggtggctatggacgtgacaaggggattgctgcaaggaacgtccggctacctcgccaagaagttccgaaccgtgaaagtgaagctgaaagccgggtacaaggtgatgctttacgccaaacagcaataattactcaacaaatattcatccactaaaattttaattgacaatgaaacagatttttgtattgctcgccctcttactgggcgtgtgtgcggcaaacgcacaaactactgacaccgtgaagtatgcggctggcaacgacttgtaccggggcattacccggaaactgccttaccgacaaatggtaacgccctacggcgtggaagtgacctttgccaagacggtgcatatcatcttccccgccgccgtccgctacgtggatttgggaagcaaccacatcatagcgggtaaggcggacggtgcggagaacgtaatccgggtgaaagccacgacagagggctttccgggcgaaacgaacttctccgttatctgcgaggacggcagtttcttttcattcaatgccaagtacgcccgtgaaccggaaatgctcaatatcgaaatgaaagacttcttggaaaatgaagatacgtccgatttctcgcatactcgcatgaacatctatttccgggaactgggtaatgaaagcccgctactggtgaagctgataatgcagagcatctacaagaacaatgaccggaaagtgcgccacttgggtagcaagcgtttcggcatacagttcttaatcaaggggatttacacctataacgggatgctctatgtacacacgcagacgaagaacagttccaacgtgcctttcgataccgatttcatcaagtttaagatagtcgataagaaagtgcccaaacgcacggctattcaggaaacggtgctggatgcggtacgcagttacaacgaggtagtagagattgccgggaaaagcaccgtccgcacggtgtacgccctgccgaagttcaccattcctgacgacaaactgctgttggtggaactctacgagaaaaacggcgggcggcatcagaccatacgggtggagaacgccgacatcgtgaacgcggaagtgattaacgaactcaaaatcaaataggaatgaagaaacacatctttataatgatgctttttgcgctgtgcctgacctcgtttcaggcacacgcacaaagatacctgccgggcatgaaaggcttgcaggtcacggcgggcatgacggacggggtgcattggaacgccaatgcggattttgcctaccacatcggggcggcgtacagcgtttacaccaagaacgccaaccgctgggtgattggcggggaatacctgcacaagaagtatgactacaaggatatgagaataccagtcgaacagttcaccgcagagggcggctattacctgaaattcctatcggacagacgaaagacctttttcctttcattgggcttgtcggctctcgccgggtacgaaacaagcaaccgaagcgaaaagctgctgccggacggctctaccttgctggataaggactgcttcatttacggcggtgcgctgacgctggaactggaaacctacctgaccgaccgggtggctctgctgttgaacgcaagggaacgggcgttgttcggctcggacatcggcaagttccacacgcaggtatctttgggactgaaattcattatcaactgaccgctatataataatgtatatgaagaatgtaatgtataaaatcatcatgggctgctacatcgtggccgccctcgtgcttgtcaccgcctgtaatgacaacttggatattcagcaggcgtacccgttcagcatcgaaacactgccagtacccaaaaggctgaaagtcggggaaaccgccgaaatacgctgccgactggtgcgtggcggctattaccagccgactacctatcagataaggtatttccagccggacggcaaagggaagctggaaatggataacggcacggtgttcctgcccaatgacctttacccgctggagaaagaaacgttcaggctctactacacctcggcatcgaccgaccagcagacgattgacatttatatcatcgacagcttcgggcagatgcagcaacttacactatcatttaataatgacaacagcgaagaaggaacggaaacaataaccccctaataataaaacgacatggtaaaaatagaattggatatagaaggtatctcgtggtacatagaaaccacgttggaaacagatacagttccggcagtaggtgacatcatcattgtggacaaggactgtatttccgaacgtgacagtgctgaattatggaaaacgccgtccaatcaggttttcaaatgggcggacgaagaagatgatgcgcccgtaatggtatggttcgattgcgacacggaaatgcttgtcaataaacggacatggaaatatgacaccgaggaagaagaaaccgtgtgcatacttggtgtaaaatttattcactatgaggatttatagttgcgacatccgtttttatcatcctcttgggaaaccgggtatggaatgatacgcaaagcgtaaatatcgggcagacagcccgccgggaagcatcggcgggctgtttccatgatagggaaaacgaaaggcttctttgttactttcttcacccgctggcaggctcacggaagaaagtaacggcggcaagcagccgccgtcctctatcaactggttttaaggctctttatggacgtgtatttctctaaccacacctttacctgctccatgttatattcgcccgtgatgattgccgtatggtcgtctatggctacaaaccggacactttcatagctgtttacccagccttgcagggaacagacgccccacgtttccacatctgcaaaaacactgcggtctatccggctgattggctcgccgaaaactaccgtcattatctgaaagtccggtttgtcctccaacagttgcaaatggtgcagcgtgccgaactcgtctattttgcgcccccacgcccacacatcattatacaaatcatcgccccactggtgcgggtggtcgaaacggacttttacctctatggtgtgttcgttttcttctgtgtcctcgataacacccgttaccattaagcccgtaaaaatacactcgcaacgcctgccgataagctccttgtttacttctgtcgttttcatgtccctgaaatttacttgtttattactccgttcttcttcgctacccattcgtcacgcctgcggcggcactcgtccagcgttttggctaccgtgctgaaaagttcgccgtccgtgtggcggtagtcatattgataataaatttgtcccctgaaagcccccaaacggcatttcacgaacttttcttctcccggtgttcgggtgatgcttaccccgtttttgttaagtgactgcatgatgtcttatttttttatggttataaacttggttgttttaagcgggcagggctttgacaccccgcccggattggttgttatgccgcacggaacacaaagccgtcatcaaaccagtaatcgcacatgaacaggtcacgggcaaactgtttgtaatcgaaataggtctttgcgaactccggcaggtcgtaacattcctctacaatttcataggcgaaatcttcttcatcgtcatattccccttgatattcatcccggaaatcccgtacaaggtcgtccgcatcttcctcgcccaaatcatggcttttatagttgcaccacacgaaaaaggcttcctgctcggtgtcgctcaaatcctccaccgcatcacgcagggcaaagaagttttcagaaatccagctttcgccgattaagccctccggcacgttctcccagtcctgaaacatgtattccgcatcttcctcgtccttgtgcagctcccggcaggcttcataaaattcttccttgtccgaatagtccgaaaggtcgagccatgcgccggacaatgaaccgttgttgtacttggcataagtgcctacataaacttttgcttccgataatacctttgcttccatattgctgtaattttttaagtttttaattttatgcggatttgagaggtgagggagttgaagtttcactgaacttttttcctgtttcccgtaaatccgactttttttttatgcgtcttccggtcgggtcggtcgttttcgtttcacataggcttgggaagggtagtgtttagagtttgcaaggtttggggcaaaaaatacctcgcaaggcagggaagattttttcgccaaaccggaacggctcgaccttgcaaaatcgtgaagaacacgtaactacctttgcctattgaaatgattaaaacgactgtcccggctgggggactgcgtaagaggaagatttacagatagggaaaccggggaaaagtgcctgttctctttcatcttttagggaacactccatgcgggcgggaaaggcaagggtgttgtgagcttgcttgcaatacgcttgtgcgggtttccaacggctcttttcacgaaatacagtcagccatgccacgcacggctggcgtttcggggaatgtgccagttggaaaaggatataaaaaatgcgggtagtcggtggactgcccgcaaggtggaagaatgtactttattgggatatagtttgttaggcggaatttcgttaccgaaatcgttacctattcgtttttgtcacggttataggtaacgaaacctaccggacggcgttctttctgttgtttcgactggcttagaagctgggtaagggcttggtacagttcgttgaactgcgcatcggtgcttacctccagttcctcgatgcgccttgacagttcctcgtaaccgattgccatttggcgcatgaggacaaaagcccgcatgattgaaatatttacttctatggctactttggagcggagaaccgaagaaagcatggctacgccctgctcggtgaaagccataggcatagcaacgccgaagttgtaagcagggggtatcacattttgtgatacccctatggataacagcaagttagcttcctcttgggtgagtacaaacataaaatcacccggaaaacgctcgatattgcgcttgaccgcctgcttcaaggctcgtgtttccacttggtagagttctgccaaatgataatcgagcatcacccggcaacctctgacctcaaaaatcttgttttggataatctgcaaatccataatcgtatattttaggagatttagcaatgttggaataatagtaaggactggtcacaaattgtgaccagttcccaataatcaagattacatggcgacttccttgtaaatcttctcgatgccgacaaacttcttgtcaagcccctgcatatcgctgcctatcttgctgttggtgatgcgggcgtaaatttgcgtggtttctatgtttgtgtgtcccagcatcttggacaccgtttcaatgggtacgccctttgacagcgtggtggtcgtggcgaacgtgtgccgggcaaggtggaatgtcaggttctttttaataccgcatatatcggcaatctctttcaagtaggcgtttagcttctgattgctgattacgggaagtatcttgccgtccggcaacttgcccttgtacttcttcaaaatcatcttgggaatatccagcaggggaacattcacgtccgtattcgtcttttgccgcttggtgattatccaaaggttaccgtcaaaggacttttggatattctcctgccgcaagttggcgacatcgctgtaagccaaaccgcagaaacaggaaaagacgaacaagtctctgacgtgttccagccgttcggaaaccattttctttttaaggatgatttttatctcgtcctccgtcaagtagcccctatccactttttccagcctgattttgtagctggcgaacgggtcacccaccagtatgccgttgttgcgggcaatgatgatgatgcgcttgaagaactgcatgaacttggcggtggtgttgtaaccgcacttgcaggcggtacgcaaatacaactcaaaatcggtaatgaacattgggcttatctcctttatggatatgtccgatacgttgtacttgctttggataaattcagcgaggtggcggcgggtcacttcatacttgcggtaggtcgctatcgtcttggatatgcccacaagctgcttcacatcgtcattgtgcttttggaacaatgaaaggattgtttcgtggctctcgctgtgtcccaagaactcgttcttcactttctcggcggtcacgtagttgtcacgccgctgcatttcgtggtaaatggtgttcagggaagaacgtatgtcgtccagcagggcgtttattcttccggcatccctgcctttggctttgcctgcggcaatgctccagttgtcgggctggatgctctgtttcgtactgaactggcaaagtttgccgtctatggtgatgcgtgccataatcataacctcgccgtttttcttttcagaacctttcttcaaataaaaaagaaccttgaatgtcgatttcataactcactttttttagttgcaaaattactttttacctctcgtttttgagttatgcagactatggactaatcaagtcattatcaggtcatttatggacaaatcgttaccgtttttgtccggcagggaataggtaacgatttagtaacgaaactttgtcttttaccgtacttttgaagtcttggaagcaggactttcgggcaataaaaaaagccacaaatcattgatttgtagctttttgtccgtttgctgaccatttctgtccagcacgttcagcggagagagaggctctcgaacctacatattcaagaaatatcataaaattgcaaatcattaataatcaagcactatttggagtacatagtaaatctaaatctttctgaatatcttttgctattccaaatattgggtgtatatttgggtgtagaatttcaaacacacccaattatgaatatcaaacgaaacatcatttttgcattggaaagccggaagaagaacggtgtgccaatcgtggagaacgtgcctatccgtatgcgtgtcatatacgcaagtcagcgcattgagtttacaacgggttaccgcattgatgtagccaagtgggatgctgacaagcagcgagtgaagaacgggtgtaccaacaaactaaagcaaagtgcatctgaaatcaatgccgatctgctgaaatactataccgaaattcaaaacgtgttcaaggaatttgaggtacaggaagccatgcccactacccaacagctaaaggacgcattcaacctgcggatgaaagatacaagtgaagaccaggaagacgtaaagataagtttttgggaggtattcgatgaatttgtaaaagaatgcggcaaccagaataactggactgaatccacatacgaaaagtttgcagccgttaaaaatcacctcaaggagttcaaggaagatttaacctttgaatatttcaatgaattcggactgaacgaatatgtcaatttcctgcgcgacaaaaaggatatgaggaacagtaccatcggtaaacaaatgggattcctcaaatggttcctgcggtggagcttcaagaaagactatcaccagaatatagcatacgatacgttcaaaccgaaattgaaaaccacccccaagaaggtaatcttcctgacatgggaagaactgaacagacttaaagactatcagatacccaaagacaaacagtatctggaacgtgtccgggatgttttcctgttctgttgctttaccagtctgcgttattcagatgttcgcaacctaaagagaagtgatgtcaagtccgaccatatagaagtcaccaccgttaaaacggcagatagtctgagtattgaactgaacaagtacagtaaagccatacttgaaaaatacaaggacatccattttgaaaaccacatggtattgcctgttatcagcaatcagaaaatgaatgattatctgaaagaactgggagaactggcagaaattaacgaacctatacgtgaaacctactataaagggaatgagcgcatagatgaagttaccccgaaatacgcattgctcagtactcatgcaggaagaagaacattcatctgtaatgcgctggctctaggtattccggcacaggttgtaatgaaatggacaggacacagtgattataaagccatgaagccctacattgacatagccgatgatattaaggctaatgcaatgaacaagtttaaccaactataaaagtatcagtctgtttcacagattatccattattagagttatctttgttaagtaatagttagtaatatggaaaataacaacgaacataatataaagaaaggtcattttgatgcctttgtccatgctgtcggttcggaaatagaacaggcacaagtccggctcattaccgcagccaatgcccagatgttgttccattactggaaaatgggcaattatatactgtaccaccaaaacctgcatggctggggtggtaaaattatcaagaagttggcacaggcaatcagattcaattatcctgaaaagaagggatattcggagcgtaatcttacttatatgtgccagtttgcccgtttatatccgttaaatgtacttcgtagttttattgaaacagattcaatactgtcagtccctaatattcaaaacattactaatgaagtccttaaactcaacagcgggcaatttacgcaggagcttactgcgcaaatacaatcagctgataatcaatctttagaaattacgcaggaggttcctgcgcaatttcagaatgtagaaaaaacagtagcaaccatctataaaataaaaatagaggatatagaagatttattcttggcgtcaccgattgcaagaataaattgggcaagccatatggtcatactcaataatccgctaccattaggtgtaaggtattggtatatgaaacaatctgtagaaatgggttggagcagtaatgtgctgaaaatgcagattgaaagtaatctgtatgacagacaaatcaagagtaacaaggtaaacaacttcactgccacacttccggcacctcaaagcgatcttgccaattatctgttaaaagacccgtatatctttgacttggcaggagcaaaggaaaaggctgacgaaagggatatagaagaacagttggtaaagcatgtaacccattacttgctggaaatgggtaacggctttgcttttgttgccagacaaaaacatttccagattggggacagtgactttttcgccgacctgattctatataatatcaagctccacgcctatgtcgtcgtggaattgaaagcaacgccattcaaaccggaatatgcagggcagttaaatttctatatcaatgttgtagatgataaactgaggggagaaaatgataacaagaccatcggtcttttgctgtgcaggggtaaggatgaggtcgtggcacaatatgccttggctggatatgaccagccgataggtatcagcgactatcaattgagcaaggcagtacccgaaaatctgaaatctgccctaccgagtatagaagaagtggaagaagaactgaccttattccttgacaaggacaagaacccataatataaagtatatggcaggaaagatacagacgatgattccccaatatggagaacttaacagaatatacagagactatatagataattacgctttttcttttgacaggcagaaattcatatcggatttctatcaggagtataatgacatgaaatcctttgaagccgctatccttgaactggtgcttgacaagcaaaaagagcaatacaccttgatactcaacagtctgaaaactgaaatagaaaagagcatacaggcttatgagatacgcccgttaagtgacagagccatagaacgtgcttgctatcagcacatggaaaggtattctcaggaaattgaagcccagctggatgttacaagaagtctgagcaagccgctgaatgaagccaacaacaggtatgattccattggttacagggagcatacagccgaagaggaaaaacaggcagagaaagaatatgaacgctgcaaggctgaatatgacagggaaaaagccaaactgaacaaactctatgaccagcaaaaggctacaagaacagaggcattccaatatatgaagaactgttgtgcggacatataccgtcaaagctgcctttttctggatatattgaagaaatacattcctgacggaaagcaagagaataaatcaagcgagccaatcagtcagcaggaaacgacagaagaacaacaggaatatttcagcatgaaattactttcgctcattcatgaggtgtgcaaaggagaacagttcgaagaaatttccgcaccagatttctatgccaatatgaatcttcacccctgcaactgtaagctgaaaataaaaccgagagagaaaatacgtgtatgctatctgatattcctgatgagcgagaaactctccaaacaggacagggacaaatggaaagacagaatactgaaactgctggatattgacgacagctactacaaatccaagtacaaggagcctgtttcagatttccccagtgacagcaaccaaaatttcgccaaggaaatggaacatatattcagataatccgtgatatatcctgatactttacgaaagttccacttttaccactcaaaataatttttgagtggtatttttgttttctgatattcaataagatacaatgatattcagtttgtaccgtccccatccttaccactcataaccctacctaattttgcatcgttcgagaacagaaataacagccagtgcgcagggctgattgtttaacgactaaatagattggacgatgacaaatatccaagaattattatcaaaacccgtctggcaaatgacaggcgaagaattcatattcctgagtaagcacgcttcaggtcaggccgaagcattgccgcaacccgttacagacacggaaaagaagtatgtgtacggaatactcggtatagccaaactgttcgggtgcagtctgcccactgccaaccgcataaagaaaagcggtaagatagacaaggcgattacccagatagggcgcaagattatagttgatgcagaactggctcttgaacttgccggaaagaaaacaggaggacggaaataatgggaggtatgcttatggactatatgagagaaataaaggaaatatctgcagaacaggcgataatcctttggcaagcctcacgtctgagcctatcgaaaatctatgagaaagcacctgagattttaaaagtgcaaggttcggtcattggcacactgggcaatttcagtgcatccataggcaaagccaaaagtaaaaagactttcaatgtgtcggctattgtagccgcctcattgaaaaacggtacggtactacggtatgtggcagaacttccggagaacaaaaggaaagtcctttatgtggacacggaacaaagccattatcactgcctgaaagtcatgaaacgtattttacggctggccggtcttcctgatgacagggacaatgaacatctggagtttctcgctttgaggaaatacacgcccgaacagcgcatcaggattgtcgaacaggctatctataatacaccggacatagggcttgtaatcatagacggcatccgtgatatggtatatgacatcaacagtccgggagaatcgacacgcatcatatccaagttgatgcagtggacggatgacaggcaaatacacatccatacgatactccaccagaacaaaggcgatgaaaacgcaagagggcatatcggtacggagctgaacaacaaggcggaaaccgttcttctcgtggaaaaggacaagagcaacggggatataagcaatgtttcggccatgcacatacgtgcaatggatttcgagcctttcgctttccgtatcaacgacaatgcattgcctgaactcatagaggggtacagacccgaagcgaagaaacccggaagaccggaagaggaaaagttcgacccttacaggcatattaccgaacaacagcaccgcatagcactagaagcggctttcggactgaaagaggaatacggctacaaggatctggaaaccgccttaatcaagtcttatatgtcagtaggtgtaaaactgaaccatcaaaaggcggtatcacttatcaccatgctccggaacaaacggatgatagtacaggagaacggcaggaaatacacgttcaagccagactttcactattagaccgtctaacctgtaatcacttcactttattcggcaggtctatatattaaggataaagcgaagcgattgcagagaatgtaaaaccgcttcactttattaccgtatcctatatatacgaaaataaagtgaagtgattatacagaccgtacttcataaaaaggtacgggcgaaaagagaaataaatattccaaccattattcaaacactcatcttattatggatatacaaacagcaaaacaaatcaggatagcggattttctgtacagtttgggacattctcccgtcaagcagcaaggtatcaacctgtggtataaatccccgttacgggaagagacagagccctcgttcaaaataaataccgaacgcaaccaatggtatgattttgcaattggtaaaggtggaaatatcattgcactggcacaggaactctactattccgactatgtaccttatcttctacagaaaatcgaggaacagactccgcacatccgtcccgtatctttctcttttggcaagcagtcattttccgaaccgagttttcaggagttggacattgtacagctgacttctcctgccctgcttgcctatctacaggaaagagggataaacacggcactggcgaaaagagaatgtaaggaagcccgtttcacccacaacggcaaacgttatttcgccattgcttttccgaacatatcgggtggatatgaaatccgcaaccgatatttcaagggatgtatcgcaccaaaagaaatatcccatatcagacagtcaggaaagccaaggagtgcatgttacgtttttgagggatttatggattacctttcctttctgaccttaagactggaaagctgtccgcaatcacccgacttcgacagacaggattacatagttcttaattccgtagccaatgttcccaaggcactctatccgttgggaagctatgagcgcatccactgtttctttgacaatgaccgtgcaggaatggaagcaatacagcaaatcagaaaggagtatgatgctacccggtatatacgtgacgcctcgcaaatctacagtggatgtaaagatctgaacgaatatttacagaaacgaatagccgataggaaagagcaagcgcaatctgtcaaaaagaggaatgatacactatccaagaaaccgaaaggcttccggttatagcccactataactacacgcttcgctttcgtagttgtgggctctcccgaggggattagggctttgccctaatgacccactcagggcgtttcacccctgagaaccccgagcaaagagtgaccctctctttgcaatctccgcttatgggttacccctaagaacccctctgcgaaagcgagcaaagtaaatcaattgtaaacaaaggaaagaagctatggcaacaaaatcaagcatacatatcaagccttgcaacatcgcatcgagcgaggcacacaaccgaaggactgccgagtatatgcgtaatatcggggagtccagaatctatgtcgttcccgaactttccaccgataacgaacagtggataaatcccgacttcggcactcccgaactgcgaactcattatgacaatatcaagcaaatggtcaaggaaaagaccggacgtgccatgcaggaaaaggaaagggaacgcaagggaaagaatggaaagattatcaaggtggcgggatgctcacccatccgtgaaggagtattgcttatcagaccggacaccacactggctgatgtacgcaaattcggtgaagagtgccaaagacgctggggcatcactccgctacagattttcctgcataaagacgaagggcattggctgaacggtcagccggaagcagaagacaaggagagcttccaagtcggtaacagatggttcaaaccaaattatcatgctcatgtcgtattcgactggatgaaccatgaaactggaaagagccgaaagctcaatgacgaggatatggcaaccatgcagacccttgcttccgatattctcctgatggaacgtggacaggcaaaagctgtcacaggtaaagagcatctggaacgaaatgatttcatcattgagaagcagaaagccgaactgcaacgtatagaggaaaccaagcgacacaaggaacaacaagtaagccttgccgaacaggaactcaaacaggtaaaagcagagatacgcacggacaaactaaagaaaacagccaccaatgctgctaccgccatagcaagcggtgtaggttctcttttcggaagcggtaagctgaaagaactggaacatcacatcgagcagctacatcaggaaattaccaaacgggacaaagctactgatgaattaaaaattcagatacaacaaatacaggaacagcatagcagacaaattcgtaatcttcaaagaatacataatcaagaacttgaagccaaagacaaggaaatatcacgattgagcaccttgcttgaaaaagcccacaaatggtttcccatgttcaaagagatgttgagaatggaaaaattatgcgctgttatcgggtttaccaaagacatgatagaaaacctcttgacaaagaaagaatccatacaatgtagtggcaaaatttattccgaagaacacaggtggaaatttgacatcaagaatgatatttttagggttgagaaacatccgatggatagtggtaagcttatgctgaccataaaccgacaacccatagtacaatggtttaaggaacaatgggaaaagttacagcagaatctacgtaactcggtgcagagagagcaaaaatccagaggatttagaatatagaatagcctattattaataaaatcaagtatctatgcatccaaacagattgtttttattacagaatcaaaatcctaagaatttataaaaaatgaagcctaaagaagttttggaaaaatggatagattgctttaacaaagcagatgcttatcatatagcagagctgtatgctactaatgcagtaaatcatcaagtcgcaaacgaaccaataattggtaaagaatcaatctacaaaatgtttgtgaatgaatttgccactgctaaaatggtttgtatggtggaaaatatttttgaagatggcgaatgggctatcatggaatggaaagactctcttggacttcgtggatgcggattttttcatgtaaaagataacaaaatcgtctttcaaagagggtattgggataaactttcattcttgaagcaacacaatcttccaattgaataagtactatcagaatacggactgggaaattgaaatacccagtccgagttatataatgaattttacttgttaaactatttaaagtcagttggataacaaaccatacctttcacattctcagtagctccaggtattaattcagccaccatgcaatattcatgagagacttcgaaaggaaattcaattcctaaatcgatagccttgcgatagccaaatcgaggataatactctttatgccccaatacgactgctgtgccgtaacccaaaagtgctgccctctgatgggcttactgaatcaacatcccccccccaattcccttacgctggaattccggcaagactgccaatggagctacactcagggatgtgacagactgggtgtcactatctatctttacttctgtaagtaagatataccagacaatttgtttttctgtcattttcttgttcttatgtaataagcaaattttaaatcgacaattttcggaaaagtaaaatcgacacaaataagtcgagacaaaatgttaataatatcaattaaatactatagccaaaccctatttaaaggggattatccttattctttatcattgtcaaagatggattttctatttcccattctgtagctttgtccagagagtttaatgacttcacaatgatacaaaagccgatcaagtatagcagaggcaagcacttcatcatccagagtttttgcccattcagtcggagccttgtttgttgtgattatcaaggacgctttctcatggagagtgttgattaggttaaagaaacccgctgcatcttcttttttcacagggaacagcattatatcatcaatggcgacgaggtcagctttcaacaaacggttgtaggcagtcatggcagatggcatcagtgttttcattttaatggtgtttataacatcttccatcgtaaccatgtatgccttgtaaccttgcgataccgcttcatagacaagtcctgccgcaataaatgttttcccggtaccggatggtcccatgagtatcagattgtaattctgttcaagccatccgagatgccttaattcacgcagtcttggtgcggttatgccttgtgagtaattatggtcgaaaaggtctaggtcgtgtcttgacggcagagaagctgcttttagtcgccgttgtaagtctttgctatccctttccagaacttctctagcaagcaaatcatgtaaaaattcaacataggtcttgctctgttcccgtgcaatatgggcttcggattccaataacctcggaagggcatacaagcgtaaacgcgagcataaatttttaatctgttcgttcattatcatataaaaaaggtattgaatgttgatatgtctgttttatcgggcaccatggaagaggtatcggaggatgggaccggctctgtttctacaggaacttccacaagggcctctcctttgtggactctgatactttcggctactttcatcaggctacatccattaaagaccttcacttccaaacatcttgtaaaggcttctatcaacgtgggttctgtatagaagggatatcggagaagtataaactgcaggttgtctctatagttacgattcttatgaatgcgtagttcagataaataggtatcaatgaccgtatccccgggaagtcttttacggacagtagcctcgtaatcatccaaggcagcttcacggtctcgccgatgtgaggtattacttattaactgtcctttatctttgcagattttgtgtgctgctatatttttccctgtttcaaggctgtaaatatacagcatctcttccttttcttccagatatacctgtgttcggtgaccttggtaggtacctgtaggaacactgtaatagttccccttgtaggtaatcacgttatccttcctgacatgatggggtaaaagctttggggaagggattgtcggaattccccgataaggcatgagatggggtcttcccatctcgaactccactgatgggatacgacgtatgccatgatgctccataccgttagcagtacgttgcaaccatgcttgaacctcctcgttgagttgctctatggaggtaaattcacgtccccggagaaaattgtactttacgtacttcactacgttctctatctttcctttgctttcgggatctgatttacggcagaacaccggctcgaacccatgttcacgaaccaaggctcgaaagccgtgggtaagtatcaggtctcctaggttctccttgacaagaaaaaccttgtcctggtcataaactattttccgaggtactcccgagaaatattcaaaggcaagttcgtgggcataaactgcaagatcggtagtaaacggggtacggctgaaataaataaatttataacggctacggctaagactcattgcaaaaaaatatactttcaagggtatgccttgcgaagtcttcatccagcgttctccaaaatcgcattgggcatattgaccataaggtgtttccggttgcttctcataaggacggtaactcttttccaattctttgggcagattatgattcagacgtactcggttgacaaagttggataccgttttagctgtgacatggggaaggtctgtaaaatgttcccgtaaacggtcatggagttgcggagatgacaaaaatggccatttgcgtaactctccgataacataagcttcataatcatcaagtttatggctgtatcggcgctcgtaactttgactctgcttaaactcttcttctgtcatagacagatacttggacaccgtttgacggtgaagacctaatgatatgcctatttgactcttgtttaggccatttgaaaataattctttaactttgtaccacattagatacttctgtaatttggaagtctcactcatagcattgtgattagttgttgacaactctaatttacaatgctattttcttttattctattgtcgattttacttttccgatttttgacgatacaaaattaccgattacatcttatctaattgttaggctcattgttgttatacattgtttaattatagataaatcgtgaatatccttctctcttaaatcgtagcccgaatggaatacttgttgcccttttgcagaaatgcaagggatgcttctgccttcaaagactgctgttccaaaatagtccggttgaaattcataccagcctccatccaagtcggcttgtttggaagtgccgtccgcattcaagacaaaaggatggatatcaatatagcctaattctttgctatacagttccacacgggtgggcaaccaatttgtttcaatttgatatcctctctcctgcaaaagatcaaggagttggtctgtataattggcatcaaaatcaatgtcaatatctctatgcaagcgggtttgctgtccgtacaagacatccactccccagcctccatccaaccaaaactgcatgtccaggctttccaacaagtccaaaacttgaaataactctgtaatcgtagtgtgttctttctttgtcatataataattctttaataaataatactatgcgtaattatccaactgcttgattgaagaaataaaatttgcacccactccaatcagaaagataacccatccgctgatcataaagacggatgtgataccccatgcttccacccaatatcctgaagctacgatacccagcattgatggaaaggtactcaaactaaagatgagagaaaaagtccgtccaagcatgtccgaagccaagttctgctgaataatagcgatgaaaagcgcatggtaaatggaataggctatgcctcctgtaaatgttaggcaaacaaaacctataaatgcgcttgatggtaaataactggcgctaatcagatacaatcccaatatcacataagccgtatgcatcactaatgtttgcttgcttttcaaagccttacaggcaagtactaaaccgcccaacaatgcccctgagccccaacccatttccacaactcccatttgcaaaatgtttccgttgaaatgcagaagcgtcataaaaggaaataacgtaaaaacaggcataaggacaaaagtcaccagcgtaaagcatacgaataaaggcaaaatgcccattgtacgccgcaaggtatgccaacattccgtcagttcttttttgaaatctggaagaactttcgttttttgaagagaaggaatctggacacaaagtaaggtcagacaagcagcaacagctccgatcacatctatgagcagaatatactgtatgggaagccaaacaacgaggcttgcccctacaacgggagctatcacctcactgaaggattgaatggaatggtacaaacctgataccctgacaagatggtgcttgggaaccagtagagggatgcttgcctgtaaagcaggtgcatgaaacgtactgcctattgaacgacaagcagtcaatagataaaaaaaagaaaggtctttataacccttggttatcacaataaaaagacatagggtacagaacgcgatgaacaagtccgaataaaacatcgttttctttcgattccatctgtcaacatagaccccggcaaacaagcctaatacaaattgtggtaaaaatccagctaaaatagccagagataaagctgtcggggatttaaattcgttgctaatccaaaaaataatggagaagccaacaatcgtacttgttaaaatagatatgagttggcctattcctatcacggccaaagttgatttccaatgattcattgtgctaatatttcatgcgtttatagataagtactttcgtacattaagcaaaacgaaattctatccacacaaaaaacttgtattataatccactcctgacgttggaatacaataacaaatactttcaggacgatgtaaagtcctgaaaaatcaaagtgaatggatagataaatattagtcttttctcatcggattcttttaatatcgctactcttttattatgtagtggttgtattatcttaaataaaacaaaaacacccgactttacattcttgggtgcaaaactgggtgtttgttttgcaatctgctgattttcagcgtttgttgcggagagagagggattcgaacccccggtagcttgcactacaacggttttcaagaccgccgcattcgaccactctgccatctctccattgcgagtgcaaagatatagtttttttattgattacaaaagaagagaccgtttttttctgattatttttcacggctcttgctatttccatttttttcctgcttaaatttcacatttactctacttaaatatatgataactataagacaaagataatgacttgttatctttgtcttatagttgtgttatctttgatatatagatgtcttatatttaagagggaggaaagtaagagaaaagagggcgaaaagaaagcgcaatgaggataaattctcactgcgctatatggcactttcatttaaaaatgtctttattttcccgttaaatggaagagtcttgattattttctttgtaaatgtaattcaagagtaaataaccgcatataccggcaaagagtgaaccgccgatgattcccattttggcttgattaagcaatgttactccgacttcgggaacattggcatacgataaattggctatgaaaagagatacggtaaaaccgatgcctcccagcatagatacaccaaaaagactgcgcttgctcatgtggtcgggcatgtgtagcaaatggaacttgatgggtagccacgcaaaggtgaaaattccgattagtttcccgataaccaaagcaacaaatacgctgatggttacgccttgtaaatctgacatgccgaagtgttcaaaagagatactggcattggcaaaggcaaacaagggcattacaacgtaattgactaaaggctgtaaattgtccgagagtgattgtagcggactgattactttgtccgaggcagattctacatgtcgtagaatggaacgctcccagttgctcagcatgtattgggtgctgcccatttcagaggtttcgggtagtttcttcatacattctcgtatctccccgacatagcgtgaaatgttgaatttcgggcgtgccggtacggtgaaggccacgattacgccggctatggtcggatggatgccggagtgtaggaacagataccatacaaccagtccgaaggagatatagaatagtttgctgttcatgcctagccgtcctcctaagtagagaaggaagatgatgggcagcgaccatagcagataagaatacaccaggttgctgctgtagaaagctccgatgacgatgattccgccgatatcgtcaactacggcaaaggctgtcaggaatattttcaaactcaagggaatcttttttcccaatagggagagtactcccaatgagaaggcaatgtcggttgccatcggaatggctgctcctcggctggctgctccttcaggacagatgagagcaaacagaacgatgggcacgatcattccgccacaggctgcaatgactggcaatagcgctttgcggatactggagagctcgcctaccagcagttcgcgtttgatttccagtccaacggagaagaagaatatagccatcagggcatcgttgattaacgacatgaaggtcatattgccgccatgtatgtggaagaggttgaagttgcctatttgtaatatcacctcttgggcaaaaaatgaattataagcgtctcgtagtggcgagttggctataaccatggctgccaaggctacaaaaagaagcactgcgccaccattgaccttgctgcggataaagtggcgtatggaagatttgaatattgcgtacatagttaccgtttatagtgtttgaaccaatccgtgaattttttgatgccctctgccaatgaggttgagggggtgtatccgaaatctgcggctaatttggaggtgtctgcccaagtctggtaaacatcgccaggctgcattcctgtaaattctttgatggcttctttcccgaggttctgttccaatagagagatgaaatccatcagtgataccggtgagccgtgtccgatgttgtagactacggctggaacaccgggggtgtcttcgcgggtggagtccggatgaaagatgatgttgacaataccatcaatgatatcatctatgtaggtgaagtcccgtgacagattgccgttgttgaacactttgatgggacgaccttcgctgatggcgttggcaaagaggatgggtgccatatcgggacggccccatggaccatagacggtgaaaaaccgcaagcctacagtctgtattttatacaaccaggaataggtgtatgccatcagttcgttgctttttttggtggcagcgtagagactgacaggatggtctaccggggttgcttccttgaaaggcacttcttgggtattgccgtataccgatgaggaagaggcatagattagtctgtggcaattctggtgacgacattgttccagaatattaaggaaccctactatgttgctttcaatataagcttccggatttgtcagactgtaacgaactccggcttgggctgccagattgatgacacaatcgaaatggttgtctgcaaaaagttgcgccaaagcatttttgtcgcaaaggtccatttgctggaaacggtaggttgtatagctggttgagcagtattcccggccgtattctttagcctcaataccacattctttgagacgggctaattttaaattgacatcataatagtcattgagcgaatcaatgccataaacttgtatgcctttttctaagagcgtgcgggataggtggtaaccgataaaaccggcactgcctgtgactaatatttgcatgattaatatattttatgattcaaaagtatatattttatcggggaaaaaaaagtcaccgtataaaatttccggtgacttaattactaaccctaaacagaaacaaactatgaaattgattctatacaaaaatagagattgttcgtatatttttgtctcaatgttccattaataatggttaatgatgattaatgcatcgggatttttacgactcaagacgtaaattgctatctgcaagtgttattggaataatctggtttgcaagggtcttgtcataaggcaattgtactttaatataattgtccgtaaaaccgcaaatatgattgcctactttgctgtcttcaaataggacaggacggcttgtaccttcaaattggtgataaaaggcactgtgcttgcgttctgaaatttgcagtagctctgtcactcggtgatgtttttcttcttgagagacaatgtaagggatttccaatgcttttgtgccttgtcgctcggagtatgggaatacatggagttgcgagatgggcaggctttcaataaagtcgcgtgcatcttcaaagtaggctctggtttctccacgcataccgacaattgtgtctacaccgataaatgcatccggtatcatttctttgattttgtgcattttggctgcaaataattctcggtcataacggcggcgcatcaacttgagcacttcgttgtttccgctctggaggggaacgtggaaatgcggcatgaagtggcgcgaaccggctacgaaatcaatgatttcatctgtcaggagattgggttcgatggaggagatgcggtaacgttctatttcatccatttcgtccaaacggtggagtaaatggagaaaattttcatccgagcctcttccaaagtctccggtgttgactccggtgaggatgatttctttgatacctttggctgcaacatcgcgtacggcctgtaatacttgtggtacagaggcgcttcggcttcgtccgcgggcatacgggatggtacagtaggtgcagaaatagtcgcaaccgtcctgtattttcaaaaaacagcgagtgcggtcgccgaatgagtaggcaaggtcgaaatctgccaatttgaatatgtcgcaggaatgcggctcttggcgttctgtctcttccagatgtcgcaggtagtgttctacattgaatttgtcattggctcctaatacaaggctgacaccctctatggccataatctcttttgcacgcaactgtgcatagcaaccgactacgacaatgtaggctccgggattgtgggaaatgattttacgtatcaattggcgacctttcttttcagccatgtctgtgacgctacaggtgttgatgacaaagatgtcggcctgctctttttctccaacggtttctgtcccagctttttcaaggctgtgtttgatggtggaggtctctgaaaaattcaatttacaccctaacgtgatataggctactttcttcccggcgatgtccatattgtctattttaagcttcgtggtggcaaaattaataatttggcttgtattttgctatctttgccgaataaacagttgggaattatgaaatactacatgattgtcggggaggcttcaggtgatttgcatgcctcgaatttgataaaaggattgaagcaggaggaccctgaagcacaggtgcgtggatggggcggtgatttgatgcgtgaggctggagctgagattgtccgtcattataaggatacggcaatcatgggctttatcaacgtggtgaggaaattgggcactttgcgtgacaatatccgctattgttgcgaggatatccgcacctggcagcctgatgtggtgattctggtggattatgccggatttaatttacgtatcgctcgttttgccaaagggatagggctgaaggtgttttattatatttctcccaagttgtgggcttggaataccggtcgcgtaaaacagatcaagaagtatgtcgaccggatgtatacaatctttccttttgaaaccgatttttatcggcgttataattatccggtgtattacggggggaatcctttggtggatgcgattgattctcgtccttgtaaagaggagactttcagcgagttcatccgtgttaatggtttgccggacaaacccattattgccttattggcaggtagtcgcaagcaggaattgaagtttgtattgccaacgatgttgaagatgatcgagcattttccggaatatcagtttgtaattgccggagcaccttccatgacggatgaggattatgctccttatttacagggcaggcagatacgtatactttatggaatgacttatcggttggtgagccaggctacagcagctttggtgacatcgggcactgcaactttggagacggctttgttgcgtactccgcaggtggtgtgttacaatggcgaagctgcacgtttaagttatttccttttcaagactgttgtgaaggtcaaatttatttcgctggtcaacctgatttttgatggcgaggtggtgaaggagttgatgatgcagcattttaacgaacgtactttggtggaagagttgtccaggattgtttatagtgaacgttatcgcgaaaaaatgctgcgtaattatgatgaagtgattcgccgcatgggcgagcccggagcatccggacgtttcgcccggatgatggtggaggctttgcgctagtctttgtaaaccaactttacattatcaatccacagtttggcatccggagcgccgatgtaggctccgccatgtccggatgaaaagcgcatgacgatatgtgtcggcttggtgtcgggagatgcccagcccacttcccggatgggaaccatttcgcctttgctgttcatgcaatgcgggacttcttctccttgtattaaagccatgaaaggtttgtagtcggcgtcttgtgtgatgtctccgtatttaaaggcaatgcggtaattgttttgccattcggtgaccggtttgtcatagcgttcataagctgttcccacgcgtttggcatagacattcccatcttcgtcttcccatctttgttgcagaagtacacatacttcggcattgttttgtatgtcgaatttctgttgccgtccgaatccggttgccttgatttgtttaccgcccggctctactttatagtcaaattcaacggcagcagggtgtttgtcgaattttatcctgtggttcagtttgccttgtggattcttggtgtcgcgcaccggttccattagctctccgagaaaaatggtgccggttgccaatacggatatattgattaatccgaatactttcacctcttccatacgggtttccatgcgggcgcagtaaccgtcgccgcgtttttcaggaaagactgtgacgctggctttataaataccgcttactttagccataacggttgaggagccccagggggattctacgtttttatagggggtattgtctttcagggtatcgcctttattgatttcatataagtattttgtatgtcccccaatgataaaggattcttttacttcgcggaccatccagttgtccatatctccgaagggtacaggttcaattctttctttaccttcttgagccatagatgtgtatgagcatagggataatgctgcaatacaaaataaaatactttttgatatcatgttatcgtgtttatgtaatcaacggcaaaggtatcaaaaaaaatgccacattgggtatttgtcggcaaaaacggtctgttcatcggtaatgtaagccgatatgtataataaaattgtaaagggataagtgcgaaaatatctttgtatcggataatttaaaaaggaatgaatatgatacactgcaaacgaaattggatgacaatattcctgatggttttagcggttcctgcttggacgcaggagaaacctgccgagtggaatttgaaatcttgtattgaatatgtccgtaagcaaaatattcagattagacaaagcaggctttctttggaggaaagtctggaaaatacccggtcggcaaaggcgcaacgtttgccttcgctctctttttcttcggctcataattacgtgaatcgtccccggacagaagctggagacaagaattcctataatggcagttatggtttgaattcttctgtgacactttatcaaggtggacagttgaaaaagaatctgcagcagatggaacttcaatatcaggtgcaggcgttgacggtcgaggaggcggaaaataatattgagttggctattacccaagcctacgtacaggtgctctatgcggatgaggctgtgaagattaatgaaaatacggtggaagtgtccaaggctcagcgcgaccggggcgaggagctgatgaaagccggttcgttgtctaaggcggattttgctcaattggaatcacagtatacttcggataagtatcagttggtggttgcccggacttctcttgataatgcccggttggaattgaagcagttgttggaattgggtattaatgacgagatgaaattggtgatacctgatttgcaggatagtgcagtgctgcaactgttaccggacaaggtgagcgtgtatcagacttcgcttgaggtgatgccggaggtgaaatacaatcagttgaatattcagattgccgggctggagaaaaagaaagcgtgggcgggttatctgccttctttgcgcctgtcggcaggagtgggaaccaaccatgcttcgggtacaagctggggaactcaggtgaggcataactggagtgagaatgtaggccttacattgagtgttccgatttttagcaaccgttccgtcaagacttctgttaacattgcccggataaatgttgagaatgcggaattggcttatgagaatgtcaggaaggatttgttaaggtctgtcgaaactatctatcaggatgctgttgcggcacaagaccgctatcgctccgccaaggagaatcttaatgcggtacagttttcctttaatttgacacaggagcagtttttcttgggaatgaagaatacgttggagatgttgactgaaaagaataatctgctttctgcccaattggagatggtacaggcaaaatatatggccatattgaacaaacagttgctgaatttctatcgaggtctggaaattcaactataaacagatgatgtaagtacaaaggtgtaaaatcaaaactcattagcaatgaataaagtagcaataaaattcggtggcatgttggtggcaatgggaataggtgcctattgtttgcaaggatgtgccgacaaggagaaaatagtttggcagacagaggctgtcgcgcgtaattcaatgtcggaaatggtgtctgctacaggtactgtagaacccgtgactaaagtggatgtaggtacgcaggtatccggcattatagataaaatatatgtcgattataatagcatagtgaagaaggggcagttgatagctgaaatggataaggtgaccttgcaagcagaattggagtcgcaggaggcccagttggccaatgccaaggcggaatatgattaccagcagaagaactatgcccgtagtaaggtgttgtttgaaaagcagttgatcagtgacaatgactatgagagtgcaacatataattatgagaaagccaagagtgcctatgagaaatcgaaggcggatattgtaaaagtgagacggaatctgggatatgccgtgattaccagtcctattgacggggtggtaatcagtcggaaagtggaagagggacagacggtggctgccggatttgaaacgccgaccctatttaccatagccaaggatcttacagagatgcaggtgattgccgatgtggatgaagctgatatcggtcaggtctgcgagggacagcgtgtcacgtttacagtggatgcttatcggggagaagtttttgagggtaaagtgacgcaagtgcgtttggaggcaacggtggaatccaatgttgtgacctacgaggtggtgatcagcgccccgaatcccgacttgaagttgaagcccggattgacagcaacggttgccatctatacgttggaaaaggacaatattctgactgttgctcccaaagctttgcagtttgtgcctgatgctgcgttggcggaagaaaatggattggtgctgaaaacgttgaaagttgataatccggctattcagaagactgtatgggtacgtaacggacagacgattgaggaaaaagagattcaggtagggacagccacaaccttgatggtggaggtgttggggggcttgaatgaaggggaaatggtgattaccggtatggagcggggtggtaagaaaaaagtaggcacacccaataccggaaatacggaatccagtccttttatgccaaaacctccgggaagtgataaaaagaagaaataaacagcggtttgtgtaataaggaggttgttatgaaagcgattattgaattggaagatataaaacggaattttacagtcgggagcgagactgtacatgcattgcgtggcgtgtcgtttgcgatagaagccggagaattcgtgacgattatggggacaagcggttctggaaagtctactctgctgaatctcttggggtgtcttgatactcccacctccggggagtatctgttggatggctattctgtacggcagatgggaaaaaatgaacgggcagagttgcgcaatcataaaattggttttgtatttcagtcatataacctgttgcctaaaacgacagctattgaaaatgtcgagttgccgttgatgtataattccgccatctcttccaaagagcgtgagcggagggcggtagaggcattggatgctgtgggcttgcatgaccggctctatcataaatccaatcagatgtccggaggtcagcagcagcgtgtggcaattgcccgggctttggtgaacaatccggtgctgattttggcagatgaggctaccgggaatctggatacccgtacctcttttgagattttgacgttgtttcaggagttgcacgcacgtggacgcaccattgtctttgttacccataatccggaattgtcggcttatagtagcaggacgattgttttgaaagacgggcatgtcataaaagatgtgcgtaatgagcagatagcctctgcaagtgagactttggcagctttgccgaaacaggaggatgaatgattgataacgaagtaaatttataagcgatgaattttacgaatttattcagaatagcattccgggctttaggaaataataaaatgcgaggatttctgaccatgttgggaattattatcggggttgcctctgtcataaccatgctggctatcgggcaggggtccaaacggagtatcaaggcgcagatttctgaaatgggatcgaacatgattatggtacacccgggggccgaccgcaggggcggtgtccgtctggatgcttctgagatggaaagtttgaaattggaggattttaatgccattgtcaacgaaactcgttatgtagctgcctgctctccttctgtaaacagtggcggacaggctatttatggagcaaataattatcccaccagtatttacggagtgaatgccgattatttggaaatccggaaatatgctgtgagcgaaggtgaaatgttttctgatgaggatattctgaattcggcaaaagtctgtgtcataggaaagacgattgtagataatctctttaccaatggtgaaaatcctgtcggtcaggttatccggttcggaaagattccttttcagattgttgggattttagaatcaaaaggatataataccatggggatggaccaggacgatctcatcttagcaccttatacaactatccagaaaagagttctggccatcacccatcttcaaagtatattttgttctgccattgctgaagagcagacagagcaggcagaggaggagatttcaagcattttgcggcgcaatcacaaactgggagctgcggatgatgatgactttaatatccgttctcagcaggagttgagcagtatgatgaactccacttccgacatgatgacggtgctgttggcttgtattgccggtatatccctgctggttggtggcattggtattatgaatatcatgtatgtttctgtcacggaacggacccgtgaaatcggtttgcgtatgtctatcggagcaaagggacgtgatattctggctcagtttctgatagaggcgattttgattagtgtgacgggcggtctgattggagttgttttcggtatcggttcttcatggctcgtgaaattgtttgccggctggccggtatatgtcgaatggtattcggtgattctttcttttgtggtttgtactgtgaccggtatctttttcggctggtatccggcacaaaaagcatccaatctcgacccgatagaagcaattcgctatgagtgattgtctgtgtgaatttttatctttatttttgtttgatgaaacagaatagaatactgaaatatattatccagatgatcggttggggagtcgtatttagttttccgctgttctttacgtggaaagaatccgaacccatgacctggatgcgctacgtgggatatgtttttgtcccggtggcttttatggtgatattttatatcaattatttcttgttggtcgacagactgttatttcgtaagcggttgttccggtttcttttggtgaatatggtattggtgatagtccttactttggttttggactggtggcacgaatttcatttctttgaaatcatgggacacgaacaccgagagcagacgggaccgcccaagatgatgtttttggtgcgggatgtcacgatgatggcattgactgttgctttatgtgtggccataaaaatgacaaacaattggtatgtcatagagaacgaacgacgggaattggaaaaagcgcgtacggaggcagagttgcaaaacttaaagagtcaacttaatcctcattttctttttaacacactgaataatatttactctctgattgcaattgatgccgaccgtgcgcaatatgctgttcacgatttaagccggatgttgcggcatgtgctttatgaagaccgtgcgccttttgtctctttggacagtgagttggagtttatgcggagttatatcgaattgatgagcttgcggctcactaatcatgtcgatttgcaggtggatatgcctaaaggggatgcatctttgcaggtggctcctctgttgtttattacgctggttgaaaatgcttttaaacatggcgtgagtccgacagagccttcttttatccatattgcgatgtgtgtgttgccggagcggactgtggtatgtcatatcgaaaacagcgatttccctaaacacgataacgatcgtagcggttcgggcatcggtctggagaatttacgcaagcgtctggaattgctctatcccggcagatataccttagataaaacagtcgaaaatgggaaatatatagcccatttggaaattaaatgctaaaataacagatagtatgataacactcacgtgtctggttgtcgatgacgagcctttggctttggaattgatggaagcttatgtgaaacgtacgccttttctcgaactgaaaggctcctgttccaatgccctggaggctttggcaatcttgcagaaagacccagttgatttgctgtttcttgacatacagatgcccgagttgaacggattggaattgtcgcggcttgtcggtgacaaagtgaagataatttttaccaccgcctttgaacagtatgcgctcgaaggatttaaagtggatgctcttgattatctgctgaaacccatcagttatccggaatttctacgggcagcccaaaaggccttacattggaaagagatgcagtcagcggcttcagcctctcgcaaagaggatgaggatatttttatccgttccggcagtaaattagtgcgaatccatttgcctgatattttgtatatcgaaggtatgcaggactatgtgaaaatctatctttccggtcagtcggcaccggtggtggcgcttttcaatatgaagagctttgaagagatgctttcgttgccgtttatgcgaatccaccgctcttacattatcaatctggacaaggtgacgatggtggagcgcaatcgggtgtttgtcggtgatacttatgtctctgtctctgattcttaccgtgagcaatttcttgagcagataaatcgtcgtatattgaaataagtttgtttgtcggatggcggattgtcgtataaataaattaattttgcgcacaaattcatatcgcatatgtcccacttgcctgcattgattacggatttggcaatcatacttgcctctgccggtgtgatgacactggtgttcaaacgattgaaacaaccgcttgtattagggtatattgtcgccggtatcattgccggaccgcattttccgttgacacctaccgtcatggattccggtaatatccagacttgggcggatatcggtgtggtctttctgctttttgccttgggcttggaattcagtttcaagaagttgatgaaagtcggcggacctgctattattgccgccttgacaattattttcggcatggtgatgctcggttatcttgtcggaattgcgatgggatggaaacagatggacagtatctttctgggtggtatgctctccatgtcatctacatcgattatatacaaggcctttgaggatttgggactgcgaacgcaacgctttacgggcttggtattgggtatattggtcatagaggatttggtggctattgtcttgatggtggtgctttccacgatggctgtcagtcagaacttcgagggagtggagatgttctatagtataggcaagctgatgtttttcctgttattatggtttttgacggggatttatattatccctacattttttcgtcgtacacgcttgctgatgggggatgagaccatgctgatcgtttcgttggggctctgtctgttgatggtggcatttgctacatacgtcggattctcttccgcattgggagcttttgttatgggttctattttggcggaaactgtggaggcggagactattgagcggctggtacgaccggtgaaagacctgtttgctgccatcttttttgtatcggtcggcatgatggttgatccgaatatgattatccagtatatcgtgcctattgtgattataattctgactgtagtcatcgggcagtcgacctttggtacttgcggtgtcatgctggctggacaacctttgaagacagctttacaatcgggtttctgcctgactcagataggtgaatttgcctttattattgccggtttgggaacatctatgggcgtaacgagtaatttcctttatcccattgtggtggcggtgtcggttatcaccaccttcctgactccatatatgatccgtgctgcgggtccggcttatccctttgtggatagacatctgccacgcaaatggaaacgcattctcgagcactattcgctcggtacgcgtaccgtcaatcatgagagcaactggaagtctttgctgacttccctgattcgtattacggttatctattccgtgattatcatcgccatactgattgttgccttgaatattcttgtgccgttagtcaaggctcatttccccggcaattggggttcattgctttgtgctgtggctattcttttgttgatggctccttttttgcgggcaattgttgccaaaaaaaaccattctgcagagtttcaaagtctgtgggcagacggcaatttcaatcgggcttatctggtttcgttggttgtcttccgttttgtattggtcatcgtctatatcatgattgtcatgatgtcgttgttcaaagcgtcgattgccatattgctgggaatggcatgtgttgtgacggctctgatattctattcgcgctatttgaaaaagcagtctatccagatagagcgtaacttcctgcgcaatttccgggttcgtgaaatgtatgcccgtcgtgccggagcaaaagtaccgccccgttttgccggtcatttgctgtcgcgtgatttgcacctgtccgattttgttattccagccgaatcgctttgggccggcaagactttggcagagttgcaactggcaacccgttttgacatcatggtggtggctattttccgcggacaagcctgtttgaacattcccggcggtaaggaacgcatctatccgcaagaccgtattcaagtaattggtagtgatgaacagttggaacgttttgggacaactttacagtcaatgaccattccgccttctgataccgaccttactcagagtgaaatgtgtctgaaacagtttatcgtcacgaaagattcactttacaatggtaaaagtatacgggaatcaggtatacgtgatgtacatcattgtgtggtggtgggtgtggagcgtggtaaatcctctttgcgcaatccggatgcagataccgtattccaggagggcgactgggtatgggttgtaggagaggaaaccgatgtacgacacctgtttaatgcctagttcaatgtggatgttcgtgcttgcctgagaataaaaaagagggctatcagtgtagccatcaggtcagcaaacggaatcgccagccagatgccggtaagtccccaccaaatggagaacagactcaatgccggaatcagaaagacaaactgccgcgaaatattcatggtaatggctttaggtgcctgacgtatagactggaaataactggttacaatgatttggaatccgactagcggcattgccagaaaagtatagcgcaatccttctgcactgatatctctcaactgcggatcccaggtaaaagcctttaccagccaggtggcaccggtctcgccgatgataaagccagcgctggcaatcagactgccgataccgatggcatacttcagcgtatcgtgcaacacctcccggtgtccggtggcataatgatagctgataataggctgcataccctgacagatacccatcagcaacatcgacactaaaatggaatagctgctgataattccgtatgcaccgatggcataatcgccaccataattcaccagatatcggttcatgataatattcaccataccggtggtgatattcatgatgaatgcagccatcccgacgccgataatcgtcagaagaatcatcaaatccggtcggaaactgagacgtacaagtcgcagtgtattttgtttgccggtgaaatgtaaaaaaatcagcaccgaactgatacacatcgaaatgacagtggcaatggcagcacctcggattcccatgttgaagccgaatataaataccggatccagaatgagattggcaatcactccggtgaggataatcatcattgattttcggggaaaaccggaagcccgaattgcatgacaaaaggtgaaattcagattggtcagcaggctgcccggaatcaggatgctcagataactgtgagcgtatgggatggtctgttcgctacctccgaatgccaataaaatcttgtctagattaaacagcgagtagacaatcagaatcagattcatcgccacatttaaaaacacggcattccccaagactctggttgccaatttatagttggaagccgagatggccgcagaaatccgggctgcaccgcccacgccggtcagtgtgcccatcgttccaagcagcgagacgcagggcagtgtcaatgccagtccgcagatagccaacggtcccgctccctgtccgataaaaattcggtctacaatattatagagagccagcacaatcatattgatcatggcagggtaggcatagcttctgaaaagcttgcgtatttgtgttcgttctgtagtatggctgggtggcatcattgtttaaaatctatcccgcattgaaatttgcaaaaataaggaaaaaggttgaaaccgccaacgtccataaaaatgcgctttccccgtctgtcgagtccccttcctgccgccaagcacctcccgaatcgactcgccctcgccgcctctggacaatctttttctccgcacaggaaaacagaatcccctcgggtcaatatcttgcttcccccttgagtttctccgtttctcatccgaagctcgtccgaacagcatcggctcagctacggcagagcaccgggcaaagttgccaggtgtaggagcggggagaggtcacaaataaaataggattttggcttgacataaatatgtcgattttacttttccgaaaattgtcgatttaaaatttgcttgttacaactgtcgttaaaccttaaatttctccgaaagggtaattcaagagttgtgagagttgaagaaaatttgcttgaaagatgatgttggtatggaacacaaactctttcatgctaattttaaagctattgggtctcgattgatttttaattgtggcgaattcgccataattaaaatcggaattataaactttcggtgcattatggtatttctgtgcttgcctgataattcacacgtttaggtcgttggcctttctgttagattaaacgatggtgttttctcatcgacatgttcagtttttgtgcattcatgaatgtgggtatgttttctttttaatctaaattgggcatttgtttttgaacggcataggctttcccgtgtctggaggtgacttggctgattgttgggaaaaacagggcgttatcacctacattgaattcgttgtctttatcatagaaatagtagtccagattatttgtgtcttgtttcgtgcgaatgaatttgttttttccatgtcgtatatgtactgtgcccttcgatagaatactggtggttagcaatgttttgtcatcgatgcgggaggcgtagttattttctgatatatagacaatgtcattttcctttaattcttcaaatctttgaggcaagaggagggtttggctgctgttccggtattgtatgaggatattgtttggattgcagtttacgacaactgctacacagttgtcattgcactcttcttgtgtcaaacatttggcaaatgttccggtgtcaaattgaagagatggattttgttgtgtcaaatattcaatttgtgagggagtcatcaattctggtcggaacagatagtgcttttctttcagtaatttgttaggtatctggtcgatgctttgaattattctgattttattttcgtttatagtccattttgttacaagaagtttactggacatttttttccaaaattctagcttgtatttgataccgtccaatagaatggcaggatgtggcagattctttttagtgtattttgttttatatgcgtagagcagtagaaggtgttttttttcgtcttcattgtctaaccaagacgggaatacctcttctccagctttgtagtttggttctaaccaggtgaatttttcttcgctttcatccgggatgacatccaataccttgaaataattgagctgcatggtatgaaggtggaggtccggatatagtttttttagcatcaggaaagagggagtatcttctgattgcagttcattatgtttggctaatagatagttgattttttttctatctttgtataggtgttcgcaaacagtgtattgttgggtgttttctagttcatgttttatattttcgtttaagagtcttttttgttgtttgaaatagtattcgctgagtctgtctgcaggaatcatataacatgctttgagtatttctattttgtaagaagccatatagggtgcttttaatagaaattcatccaagcctgctgtgttatagagatgattggttaaaaatcgtgtcgctaacagtgtttcttgattttgagaggtcattcgggtgaagagagtgccatacagagagaaggtgagatctctgttcaggtctttaggtaatagttcgaggtaatcaaattgtaaattgtccttgccggcaagctcttgctcgatatagtttgcatctaatgtcatcagtagtgcatctatgtgtccggttgcatcatacagtttttggtagtcttgaagactcatgttggagaataagacgtgttttaatctgatgatacgtatatttattgcttgaatgcaatcaaaatccttttgtattttgtctaattgtatatatgcttccgatttgcaagagatattttggaggaaatatgcgattgtttttaatagtttagagttcgctttggtcatattaaaggcagagtcttcaggggtgtacaaccaatattctatccaacggaaactttgaaaatataccatgcaaagcgaggtaacgtctgctgtgaatgtagctgtcagcagattgttgaatcgtgcaggtgttttttgttctgtcggcagctgtagaaagttctgtatgtgttgccataggtattgtagtagccactctcgaataaatggattgacttgtaatatggaggcaaattgtttaaagaatatttttaacttgtcgttaaaatagggcgtttcgctatttgatgcatattgttttgcaatcagttgtaaaaagatatttgtgagatagttgtcattgtaagcggagagagtctcgcatagtaatgacaaggtttccctccattcaggtccggtcaggtttacgcacagctcttggtagtcaagaaattgcttgaaaatatattgggccgtgaaatattcttggaatgtctcatggataaatgagatagaccagaagttgttctgtttgcaagtgaatgaaagcagtccgctttgcatcagttggcgggtgatatggcttgtctgatcgggtgcaatccattcggagataatggcttccaaaccagaataggagtcggaaagaaagccgtattttcgcatggaaaatgccaggaatgagagtgttttaagcacggtctggcgttccttatcttttataatcccgcttttgttgagttgaaactgtatgaatttttcatagagttggcaccgtagtgtcggtaatgtccctgttttatgactggtttgtacaatcatcgtcagtaatagcgggttggtggttagggaatggatagttgggtttgccgttaattgccggtataatgtttcatcacctgtctgttgcaagatatacgaccgtatgtcttcgtccgtgaattcgttgagctgatatgccgggaggcttagttgtccgttgtagccatagagccgggatgtaacgatgatgcctgtctgagggtatgtgtttacaagataggttatcgtagagagagtttgtttgtagagcataggcggaatttcatttaatccgtccagtagccagacaactttgcctgtttttatctgttcgtagaattcgatggaatgttcgtatttgtttatgaggttttccagtgtttcggtagttgtcagttcttttaatggaatgtatatggggatatcaccgctattctgttgaagtctttgctgtgctaacgtatatagaagatattttgccaatgtggtttttccggaaccggggttacctaaaataattagttggcgttcttcttcaatgacttcagtcgcttttttttgagtctggaccgtttctttatttttatcctcaactaaattattgaatgtatccggataatcgagttcgtcatatgcctcatcttcattctcatcagaatcattatagtcattctcatcattgagtattgacaaataggtgttgggcatgagtgctgtattggagatgatgaatgaatgcaagggctccgcttgcatttgctctatgatattttccagataatcggtcagtagttggttcatggatgttaggttaattgattatataaaagcaaatgtattgattatatgcgatagggcaatcagggagaatgtatttttattttctctgtgcatttcttttaattttatggttcttgaaatctggataatgtgaaatttgaatggtatatatagccggataatgtgaaaaatcagtgtgtttcatggtggataatgtgaaatttattatctttgtgtttgaattatagggttttatgatatggaaaagttattgaaaagaaaaatagatgattggttgctggcatggaagcgtaatccggacagaaaaccgctgattgtcaagggtgctcgccaaataggtaagacgaaatctattgagcattttgcagagctacattataaaaatctggtagagattaattttgtagaggaaaagaaatatcgggatatattcaatgacggttatgaaatagatacggtccttaagaatatatcttggttgaatcctgaatatgaatttattcccggtgagactcttttctttttcgatgagcttcaggtttgcccggattgtgcaacttctttgaagttcttcaaattggacggacgatttgatgtcatctgttcaggctcattgatggggattaattataaggaaatagaatcgaacagtgtcggttacaaagaagattatgaaatgcattctatggattttgaggaatttctttgggccaaaggatatggagaggatgttataagtgatctttttcaacacatgttggaaattaagcctctgtctgatttgcagttgtctgttctatttgacttgtttcgtgattatgccactatcggtggaatgccggaagtcgtgcgtacgtatgttgaaaacaataattttagcggtacgcttgatatacagagacagttgttaaaggattatgaagaggatattactaaatatgcagaagggttggataagggaaaaatcaaggcggtgtataatcatatttccacttttttggcaaaagagaacaagcgctttcaaattacaaagttgtccaaacatgcccggaatagggattatgtgggctgtacagaatggttggctgatgcaggagttgtaaatatgtgttattgtttgaatcagccggaacttccattgaaaggtaattacgatgcttctctatataagatttattttagagatacgggtcttttgattgcctctatggatgatgaagcccaggaagacttacgtgccaataaaaatcttggtacttacaagggggcaatttacgagaatatagtgggggatatgttggtcaagcaagggtatggattatattattatagaagtgacaagccttcgttggaaatggatttttttgtcagagacgttgattcattgatccctgtggaggtaaaggcgaatgatggtgctacggcttccttgaataatttactgaaaaatgataaattcccggacgtgaagtatggtattaagttgggttataaaaatataggattcaatggtaagttttttacttttccctatttcctgactttcttgttgaagaaatttttggctgagaattcttttgatagaaattccattggagtagataaaaaagagaatatctaatcagttctgcagtggcttttgcccaaagtattttcatttactgaataatatgtcattgctttttagataaaatcatgtttatgacaggtatttattgtgattgttggtttgtgtatctttctgctggttgtctttgtgtttgctttcgaagatggagacgatgtaggcggtgaagacagggaaaaagatcatgccgaccatggcaaggactacggcgaggaattgaccgattttggtaacaccgtagatgttggaaccgacggttgtgacgttcatgagggcccagtcgaaggcattccaataggtggaaacttgtggattggtgtcgtgttcaacaaagtagaacatgatgctgcaaaagtagatggtggtgaatagaaaggtgacgtaagtggcaaacagacctgtgacacggttgcggctgagccagctgaaaatgacggatactccgtatatgcctcggatgacggggatgatgcggagaaatatccataggggatgggcagcaagcggatagaaggaatgaatgaggttgagataggggatggaaaccaataggaagatgaggttgtgccagagaaaatgaactccttcgtggctatagtaccaccggatcagaaagtctatgagaaagatgcagcagatggtcaagtggaagcgcaggatgaagcgggtgcagagtagactgctgatggggaggatttcaatggagatgaagactaatatggcgatgcttgccaaaagtactaggatgttgagtgtcttttcaatgatgttgtctttgtgtgccatgtcgtgagttttgtgaattttttacggcttactgcgggaaaggttggcttggtatgctgtattagtgttaattgttgctatttttgtggggtaattatgtgtggatatgaaaatgaatcaacgggattttttattggaatctttaaatagacgggaggagagggcttatgagttgctctaccgttatttttatacaccgttggttttgtttgccgggaagtatgtcggtaatgaggatgtggcgaaggatattgtgcaggaagtctttatttcaatgcttgatttggagatgaagtttgatacacgcgtggctttgaaggtttatctatatacttctgtgaagaataaagcgctgaattatctgagacacctgaaagtcagaggacaatatgaatctatggcattgaaagagggggagaaatatgaagtgtttctggagagaatgatggaggaagatgtgtttgcccgcattatgatggtggttgagcagttgccgccacaataccgaaaggtgatgactctcacattgaagggatataagatttctgagattgcagaaatgatgggaatctctttggatactgcgaaggagtataaaaaggatggtaaaaagagattgtgtaccaagttgaatggtgctgtttattcaatattggtaggtattcttttctcataatacctgatttaaggtattcttgtgtttttgcttttacaataagtttgtgccgggattttgagtttattttgaatcctatcccccccgttttgtattgtgaagtgtttcttgataaacggaaccaggaattgaaggattgtagaattaagtttgtctatgaaaaaagaagaaaaaatatttaggatatcggaaattatttccaaatcgttgggggagaatttgaacgaaaatgaagtgcgtgaattagaagtatggctggcagaggatgagcataatagggaattgctgaaggaatggaaatctgttgtaaaaacagaagaaaagattgaggcttacaaacggttaaaatactcggaagcgtgggagaattttagaaaagtccggcaggaaaagttggtgttgcgccgtagaaagaataggagtgtttggttgaaatatgctgccgtgtttgttatttctttgggcgtagctgttgttttattacggaatcagggagaggataaagtggtgcaggttgccgagacgacggttagtgcaggtaggtcccaggctgtgttggttttgtcttccggagagcgacagactctgaatgaagagggaaaacgtatagaagatgggggtatgactatcaagactgaatccgggactattaattattccggtctagtgcaatcagaggtaaaaggtgagaatgtgttccatacattggaagtgccgaggggaggagaatattttatggtgttggcagatggaactaaggtatggttgaatgctgatacacgtttgaaatatccggtggcttttggtgggggtgtaaggaaagtgtttttggaaggagaggcttattttgaagtggcaaaggatgtccggcgtatgtttgtggtagagacagctcatgctagagtgaaagtgttgggaacttcttttgatgtttgtgcttatgaggaggatggtaaggtctttacgacgttggaagagggaagtgttgagatggagaaagcggattatacggaggcattgagaatgatacccggtgaacaggtgtgtcttattgaggatgggaggatggagaagtatgaagtggaaacggaattgtttacttcttggcgttcaggaagattagtatttaaaaatatgtctttggaggagctgatgcgtaatatttctcgctggtatgatgttgaggtgaaatttaaaaaggagcatttgaagcgaattgtgtttacgggagatgtcaagaaatacgaggatttggatgaggttttggaatttgtggaattaaccagtgaagctcgctttatgattgaaggagatataattacagtatattgaaaaatgcatgattatgaaaggtaacaatgttttcagacgaatgttgtggactgtgatgttggtgttgtgttgtggcagtctgtttgcacaacagaagaagttgacgattgatttgaaaaatggttcgtttgcacagctgacagatcagattaagaaacagtcggattatacttttttctttaacaatgcaatgttgttgaatttaaaacgattgacaattcaggtgagtgaggtgtctatcgattcggtgttgaatttggctttgaggggctctgaacttacctataaaattaaggataatacggtgattttgtattctcgtgatattccggaggccggcagtaagacggttaagattcaagggcaagtgaatgatgaaagcggaatgccgttgcctggggtgaatgtttttataaagggtaccactgtgggtacggtgactgatatggatgggaattattctttggtggtgccggaggtgatgggtatggaggtggtgtttacttttatcggtaagcaaacaagggaggtgaaatatacaggtacacgttttatgaatgttgttttgaaggatagctataacgagatggaagaggtacaggtcagagcccgtgcaaatattaacgaaattgatgttcgtgcaaaaacaggtgttgtcagtgaggtggatgtccgcaggatgaataataagccggtaatggatatggctttggctttgcagggaatggcgcccggactgattgtgactaataaaggcgatttgggtagtaaaccggaaatacgtattcggggtaattcttctttacgggaaggagatgctgccaatgaacctctttatgtactggatggtcaggtgatttcgtcagatgcttttttgacgttgaatccgaatgatattaaggaaattaagattttgaaagatgctgctgcttgtgctttgtatggtattaaggcagccaatggcgtgttggaaattacttcgcaaagggggactgccggaaaaatggtgtatagctataatttcaatggtggtgtgactttgcgtggacgtcggggggtgaagatgatggcttcgaaagagaagttggagttggaacgacgattgggtaatactgcgacgccagggtatcgttacagtgaagattattataggaaatatcatgcgaacgatccgaatttgcaggctttgatagcacagggacaacagaagttggattcgttggcaaatataaatacggattggtttgaggagttgttgcgtaataatttttatcaagaacataatctgagtgctcggggtgggtcggaacagaccagtttttacgcttctttgaattattcgcaacagggtggacgtattccgggaaatgatattaagcgtgtcaccgcccggctgagtgtcgatcaggagattaccaataaaatgtatgcttcgttgagtgtgaatggcggatattctgtgacaaataccccgaatggtacaacttattctccgacggatttgatttaccagttgaatccttatgaaacaaaagatattgatgctgagttggtttctttcccaggaaggacttatgcagatttgtttaatcagtatagagagaagacttctgataagagggcaggtgtttctggtagccttaattattccgggattgaaggattggaagttgcagccgtagctggaatagattatgtgctgtcggagaaattgggtatcactccgccgacagcttattctgaattgaccagtggtgtacctgaacgggaaagaggtatccttacaaaagataaagatacgaaaatgaatttgtcttccaatgtgcgtgtgacttataataaggtgtttggaaagcatgatctgactgtgggtgccaattttgatttttattctgatcatattgataatttgggtattataggatatggactgagcaaaaaaatgcagtcgccttcaggggtgaatcagtcgatcgaggggaatagaaagccgtcttttacttcccgtaatgaaaagaccgcacaactgggtataggtgttttggccggatattcgtggaatggtatttatgatttgttcggtacatataaaagtgatgcttcatctattttgccacatgacaagcgttggaattctgcctgggctgtagggggtggatggactttgagtaattattcttttttggaagataatgctgtgttgacagagctgaagtttaaggcttcgtatggatgtacggccagtttgcagggggtgtcgccatcttcggctgtcgctacgtttcaatattcggaagatacctatggcgatgatcaattgttatcgctgattgggttgtataatgcagatttgaaaccggaacagacgattgacatcgatgccggtattacattgggattgtggaatcgtgtgacattaaatgcgggatggtatcggcggagaacaaaggatgcattgttggatgtccctatcccagcttctaatggctttactactttgaggcggaatatcggtattcttgaaaataatggtattgaaggtgaattgtatgtgaagattgtcgatcgtcctaaatggagaatgtccggacgtttgaatatggcttataatcagaataaggtggtcgatttgtatcatactgatcgtttgtatacatcagaagaaagtattatgcctgattttgaagtcggtaagtcgtatgatatgatttatggtcctatttcgttgggtattgatcctatgaccggattgcctgtttttaaaggtggtgacggtagggaaattgcagcgacagaacggttgacgcgtgatgatatggtggcattgggacattctactccaccatattcgggtagtttcttttattcgttgtcatatggtaattttgatttggatatggatttttattttgtgtttggaggaaaaaaagcatatagcttttcttatgtgagagagtttgaaaatgcaaattataatgccattagagggcaagtggataatatgtggtttcaggaaggggatgaaggaaagatttatcaccgtccgttttattcatcttcggctgtagataatctgaagttgtatgccaatagtcgtacagtagggaagagtgattatttgagactgtcttctttgtcattacggtatagattgccttataggtggattgaaaagacaaaaaatgtgattcagtatgcttctgtggcctttcaggcatcgaatctttttacttggactcattataaagagtcggatccggaatccgggtcgctggtgggtacgcaacagccggtgtttacattgaatttgagtgtcagtttttaatatatgagttatgaaatggagaatgtttatatgtgcaatttgcttcttgacaggaagttgttcactggatataccattggaagatcagttttctgatcccgatgcaattacggatgtgttgtcagcccgttctttgttggcttctgcttatgaagctgtaccgcagcagatgtttcaactttctgttttgtcggatgatttttgtccttctcagcatttgaataaggagacagctttgcagaatctttataattggagggaggtggagatgacagaattggcagggactttatggaatggacattatatggttgtggctgaggtgaatgctttgttggcacgtatggatgctgtggtgacaatggatgaagaggaagaacaggaaaaagcgcggattgtctgtgaagcaaaagccttgaaggcatggtgctattttgatttgttgcgtttgtttgcccctcgttatgaaggaaatgaaaataaagacggtattattttgaagaatcgggtggaactggattttttgcctcgctcatcggtggaggattgtgttaatgaaatccgtactttgttgaaacaagccaggagtgttgataatactccggaaaatgtctattggctgtcagataaagctgtggcttatttgcaggtggaattggaaatgtatgccggaaatttttctgctgtcttggagttgacaaaggatctggaatcggagtatccggaaagcgttttgggtggtgatgtttataagtatctgtggagcagtgatgagtcggatgcccgtatttttgccaagtatcagttggagcagatttatatggaaatccgttttgatacttttgaaaagggggattatctggtgttgtcgcggaatattgaatatgaggagcaggatattcggaaggaatggtcagaaattccatttgtgatgcctgatggacagcatgttcgtttgttcggaaagtataataagatgaatagggatgaaattgtaagtaaatatgtaaatgtatctagggctgccggtatgtggctgatgagggtggaagctttggcgcgtaccggtaaggagggagaagctgtgaaactggcaaatcagttgttaaaacggcgtggtgctacggaatgggatataaatcttgcagggaatgagctagtgagcaagatattgattgagagacaaaaggaatttgtcggagaaggttcccgttattttgatatgaagagatgtggattgtctgctattcggtatgatatgtatgggaataaggcgataggtactgttaaggctgacgattaccggtggacattgcctattcctgccagtgaatatcgttataatacattggtggaacaaaatgaagggtggcctaagttggctgtgtagaatatattaattatgaaccatataaaacaataattatgaagacgataagtaaattaaaaagcttgcttttattactggttttagcagtaggagtttttagctgttcagattcggaagatacggattatactggaattaattcgatatatatcagaacaagtgaagatcctgtaattattgcttctgatacaacagctttgaaagctaccctgacattgaccagagcatatgaccaaccggtgtcgttggagatggttgttaagtcacaggcaaaaggtgtggaggagttggtgactatccgtcctatgattgttacgataccggcaggtttacgtaatgttgattttgaagtagtgtctaaccaaaaggatataagagaggctgcgcagattgaaattagtgttaaggaacctcttccgcaaaatgatatgcaggtgaaggaaacattgcgtgtgaatgtgaaaccttatctatcagcagaggatttgacggaagagcagcaggcattgttggaaggttataagaataaggggctggatttgacaaagtggattggggtgattccggtgaaggtgacggtagatgtgccgcctactgattatttggcatctttggtgggaggtatgaataaaacttatgagggtaagagtgttattacgttgagtgaatatgctacaatggaccagccggtgttgaagatgacagagaatccgatgggactgatggagtttctgtatgatatcttgcgtaaggaaacagttgataatgatgaatattggtatggagaatatgccagtgagtattaccagattatgatggatttgatcggattgtctaaaacaagtgttgagaagtttgctgtaacattggatagtatccgggtgaatatgccccaaaatggcgagtcgatggttgagtttttaggaactgttatgaattcgtataaagagccgttgacagttgtaccttttgtatatagttattcagcttgggagcgtttgaaagataagttggaggcaggagatgaaaaggcattggagtgcgtggaatacggagcgacggtgaatcctttgaattatctgataaattcttctattgatacggatgtttgggaagatagcagcagatggatggagccgacaggtgtcttgaagggcaataagttgacgttccagtttaattttgatcatgcaagtgctgccggatatactaaaattacggtggaatatattttacctgaataataaattggttagcgatgaggtgttatttgactattgttttattgtgtatttctctgttgatggctaagggacaggggaatactccggcaaatgagctgattgcgttgccggaaggtacggtgtatgagcagttgcctaatggattgcattatgtgattaagcagaacgatatgccgggaaagaaggtggaatttcggttgattttgcgtgctggctctattttgcagactgatgatgagggtggattggctcattttctggagcatatggcatttaatggtacgaaaaattttccggagaagaaaatggtggaatatctggagtcgttgggggtgaagtatgggtttggtattaacgcttttaccggttttgaccgtacaatttatatgttttctatgccgacagaccgaccggaggatttggataagggtctgttgatattgaaggattggctgaccggtattaccatggatccggagcaggtggaacgggaaaagggggtgattctggaagaggcacgcggatatgatacaggagatcctttttatgatttgaaggtgggcgaaactcgctatagccagagaatgcctttgggaactgcagaggagattaagagtatgactgctgacaagttgaataattattatcggaaatggtatgtcccggagttggcaacggtggtagtcgttggagatttgaatgcagctgaaatggagcagaaggttaagcatgtgtttggcgatatcccgactggcaagttgaaaggatataaaaattatccgttggaatatcaggagagaatcgtttgccaaaagattgaggatacattgattaaccgctctacgttagagttgatagtgccgaagccgacaacggtgcaggctacgtatggagaccggttgcagaaaatgaaggagagattgctggtatcggccatcaatgcccgtttttctaatttgaatacgcgtgcctcgctttccgatgattggtatttgagcgataaggatcatttggtgctgtctgtaagtggtgaaaacgagaaggaaatcaagtgtaaagtggcaaatgccgtcaatgccttgaaacagattcgtgaacaaggtttttgcaaagaggaattggatgcactaaaaaagagtgccattcagaaattggggcgtatttatgctgtgaagagttctgaacagtggtgtgaggattttgctgatttggcaatatcgggagagcgttatgttacggatacgctgcataatgcctggctagcagatgaattgaataagatggagagtagagagttgcagcaattggtaggggattggttcggaggatggaagaaaatacgggttacgtatcactataatccggaacggagtgctgagttgtcgggacaagatattttggcagtactaaaggagggtgaaaatgctccgtgtagggattatgaatatgtggcagaggaacgggaagaagaggaaaaggtggagattcccgatttcctgacacgtaagttttctccgactcatttgtcggtggtttcggaacggatgatagaaggattggaggtgaaggaaatctgtctgacgaacggtgctcgtattatcttgaaacgtacgaaggatgacgaacgtcagattacattgaccgcttttgccaaaggaggagcatctgtgttgactcctgagaattacccgctgttggaaggggtggccggatatatggaaatggggggtatagagaagatggattatgatgattattatgagatgttaagtcaggaaaatatggcattttcagtgacgttcgaaccctattggcatggttggatggctatggctccggcagataaggctacggagttgtgccgtttggtttatgaaaagtgtttttatcctgaaaaacggtatgatgattttgaggaggttaaaaaagagatgctggaagatatgggagaggaaactgtattgtcaaagatgctgaagaatgcccccgaccgtcagatgtctgcaagaattgatgagttgatgggtaattcacagacgaacggttcgatggctgatagccgcgaagaggtggaagcgatgaatttggataatattgctgatttttaccggcaactgtatacaaatcctaatgggctggtgtgtgtggcttgcggtaatttcgatatggcagaggtggaaaggaatctggtggctatgttaagtatgtttcctgcacaggataagccgaataattgggtgttgtctgattttgcatatccggccggcggttttagtgagaagtttcccaatgccaatgaaggacagacgatatttgattatctgtattatggttcctatgaggcaggtttgcggaattctctgatgttgaaattggtaagggatgtggttcgcaatcgtctgttgagtattttgagagaacaggagtctctgctttattctccttatatgttgttgtattataaaggtctgccaatagctggatattattttgatatcaatgcttctgtggataccaagaatatggaaaaagtggataagttattgaaggagattattcgagacgtacaggaaaatgaaattgatgcagaagaattggcagcattgcagcggtcttttgtggtgacgcgtcgtgaagtggtgaatgattatgccactgccgaatggaaaaaatatctgacaggtgctttgcgggatggagagactttggacgatttggctcggtatgatgagattttgtattcgattactcctgcagatttgatgcaggcttgccgcaagtatctgaatatggaaaacagcggtctcctgatgatgcagggagaggataaatgacaggtagaatggaatttaaaaagtagatgatatgaaaatttttcagtgtattttatggatagtgttattatgtgtctccattgaaagttggggacaggagaagagggcttatcgcttgtttaatgccgaggggaaggaagtggaataccgggagatgctgaaggtgttgaaaaatcaggatgttgtatttttaggcgaggtgcataattgtgcaattgctcattggatggagtatgagattgtgagggatttatgcgaagctcataaggataagttgactatcggactggagatgctggaggcagataatcagttgattttagatgaatatttaggagggttgatatcttctgaccgttttgaagaagaggctcgtctgtggcctaattattttacggactatgctgctgttgtcggattgggacgcgagtatggcctgaaggtggtggctacgaatgtgccgcgacgttatgccaatatggtgaagaatggcggatttgaggctttggagaaattatcggcagaggcaaaacggtatatggctcctctaccgattgattatataccggatgaggaggctgccggcatgttcggtatgatgatgatggggggaggaaaacatgcagatccggaaaatatggctaaagcacaagcattgaaggatgcaacgatgggatggtttattgtacggcatttaaaatctaaattagtacatttgaatggtaattatcattctgattttaagaaaggaattgttacttatttgagtaaatatcgcccgggattgaaaattgccactgtatgttcggtacggcaagatgagatagataaattgggtgaggaaaatagaggacgtgcggatttttatatctgtgttcctacagatatgacaatgacttattaagtattcttttttgtcaggagataccattggtgaagttttttgttttccttatttttgcaggaaatacaaattgaatgcaacaaatggatgttttagaagctttggctttctgtttgaagcggggaatcgctttttatgcatatcgtttacctggaggaaagagtttttgctttggtgctcagctggagggtgaagtggtatgtctggatagtgtggaaaatctggcggacagtgatggatttgtggcagttccttttcgagaagatgagggggctgccccattgtttatacggggggatgtggtatttgaaggtatgatggaagagcaggaggtgttggcaaatttgcagcaggcagagaggaagaagggggtggatgtaaagccaaagaaggcatgcagtagggaggattatcggaaacaggctgatggcatgattggtgcattgcagcaaaaggtggcccggaaagctgtgttggcgagaggtatagtcgtggagacagatgcatattgccgagccccgcagtggtttgaatcacttgcgttgcgttatccggatgcttttgtattttttgtgtcggtaccgggaaaaatgacttggatgggtgcgacaccggagattttattgaagcaggaagaacgggaggtggtgacgatgtcgctggcaggaacccgtaaagttgggagtgtaggtgagtggggtggtaaggagttggaagagcaacgaattgtgacggagtatattgccgatttgttgcagaaagtaggagagtggagtgtagaagggccttttacgaagcaggcaggaggagtggagcatttgtgtacggtttttaaaaaaaacggtcaattgtcgcttgtagatgtagaacggctgcgtagaatattgcatccgactccggcagtgggtggttttcctttgcgggaagcattggagattattcgtcgggaagaagggatacatcgacgttattatgccggctatgtaggtccgtggtatcggagcggctgttttcaatggtatgtaaatttgcgtagtatggaactgtttcctggtgctgtacgtttgtatgtagggggagggattacggctttgtcggatgcggagaaggagtgggaggaaacggtgatgaagtcaagaacgttgctggatgtgataggaaatgatttatgagaattgatgaaatgatggaaaatataaaaagtacagaaaaggagggagtgaagatattgttggatgggttggtagcgaaaggcgtgaagcatgtggtgctttcaccgggttctcggaatgctcctttgttaatgggagtggcaagggagaaacgtttgaaacattatgtggtggtggatgaaagaagtgctgctttttttgctttgggaatggtgcagcgactgggcgaaccggtggctgtggtctgtacatctggaagtgctttgttgaattatgcaccggctatttcagaggcttattatcagcggttacctttgctggttgtgtctgcagatcgacctgtagcttggatagatcaagatgatagtcagacgattcggcaacgtggaattttacagaatatagtgaaagcttcatttgaactagcgggagaggtgagagatgatgaagaatgttggttggctgtgcggatggtgaatgatgcgattgaatgcgcggtgaagggacgaaggggaccggtgcatatcaatgtgccgttgcgtgagcctttatatggccagcgggagtggaatcaaatggagcatgttagaaatatagagcggatagatggaggagatataattgccccggaggtgatgtctgttttatccgagcgatttgaaaattgtccgaaagtgatgattttggccggttgtcatttgccagagcgaaaggttcaagaggcgttgattcggttgggagaattggaaaatgtggtgattttgtctgaaactccagccaatacagggaattgtaagcaaatcggcatgattgaccgggtgttggcaacagtggatgagcatgaacggagggagtttgctccggatttgttggtgacttttggagggccgttgatatcccgtcatgtaaaagcttttttgagaaggtttcgtccgcaggagcattggcatattgacaggagtactcatttggtggatactttccaggtgttgacgaagcaggtggatttggaagcgggaagctttttggatgcattgagccgacaagtgaaggaaagacattctgattatgcaacccgttggcaagctaagaaacagttgtcggatgtacggcatgcggaatttgaccaagaggtgggatggtgtgattggaaggctttttcgatattgttgccagcgatcccccagggggtggcattgcaattgggaaatagtacgccggctcgatacggacagttgtttgactgcagacagatggagcgtgtggatgcaaaccgtgggacaagcggaattgacggagcgacctctactgccgtgggggctgcggtgctgaatccgggaatgacacttttgattaccggagatatgagtttcctgtatgattctaatgcattgtggaaccggtatattactccacgattaaagattgttgtgatgaagaatggtggaggcgggatattccgctttattcaaggaccctctgagctggaggagctggaggagtgttttgaaacccggcaagaggtgaatgtccgggggtatgcggatttgcatcattttgcttttttccgtgcagaaagtgttggggagttacagcaggtattgcccgatttttgggcagagcgtgaccgtcctgccatgttggaaatagatacgaccatgtgcgataatgctgcgcaactgaaggcgtatttcagaaagttatcaggagaataattatttaaaatcaaaatatgatgagaacttggactacaattaaggaatacgaggacattaaattcgagtttttcgaggggattgcaaagattacaatcaatcgtcctcaagtgtataatgcttttcgtcctcagacgaataaggaaatgttggatgcaatggttatctgtcgggaacggaatgatatcggagtggtggtattgaccggtgcaggtgataaagcattttgctcgggtggtgaccaaaatgtgaagggagtgggagggtatattgatgaaaatggtgtgccccgtttgaatgtgttggatttgcacaaggcgattcgttcgctaccgaaaccggtgatagctatggtgaacggatatgctatcgggggtggtcatgtattgcatgtggtttgtgatttgacgattgcttccgaaaatgccagattcggtcagaccggcccgaaagttggtagtttcgatggcggttttggttcttcatatttggctcgttgcgtaggacagaagaaagctcgtgaaatctggttcctttgtcgtcaatatacagcgaaggaggcagaagagatgggtatggtgaataaagtggtgcctttcgaacaattggaggatgagacagtggagtggtgcaagactatcatgaaacggagtccaatggccatccgtatgattaagcgcgctttgaatgctgagttagacggtcagcatggtttgatggagtttgccggagatgctactttgatgttttatttgatggaggaagctcaggagggtaaaaatgctttcttggagaagcgtgatccgaattttgaccagtttccgaagttcccatagcagcgtatgaaaagggcagaatatagccggtatttattgcattttaaggaagatgccgggacctctcgaggagtgttgaaggaaaaggaaactttctttgtgaaggtgtgggatgagagttgtccggaggtgttcggcatgggtgaatgtgccttgtttagaggcttgagtgcagatgaccggaagaattatgaggagaaactggaggaggtatgtctgcggatagaggaggtgaagatggaggagttggaagagtggagttctatccgctttggtgtggaaatggctttgcaggatttggcgatgggaggttgtcagctttattttccttctgcatttacagagggacgtcaggctattgagattaacggtttgatatggatgggtgataaatcgactatgctgcagcggattcaacaaaaactagaggcaggttttcattgtataaaattgaaaatcggggccattgattttgaggcagagttgtcgttattacaatatatccgagaacgattcagttgcgagaaggtagagctgcgggtggatgcaaacggtgcatttgctccggaagaggcaatgagtaaattggaagctttggcggctttcggtttgcactcgatagaacagcctatccgtcagggacagtgggaggaaatggcgcatctatgtagggaaacaccaattccgatagctttggatgaggagttgataggagtgtatggaaggaagaagaaattggagttgttggagaaagtgcagccgcaatatattattttaaaaccagcattatgtggcggtttctccggtgctcgggagtggatagaattggctgagaagagaggaatcggttggtgggtcacctctgcattagagtcgaatataggtttgaatgctttggctcaatgggtggcgaccttgggaaatccaatgccgcaaggcttgggaacaggtcagctttataccaataatctgtggtctcccttgcgtcaggaaggggaatgtttgatatacggaaaataatcgtggtatgttggttgtaaatacacatgatattcatgaagttggttgtctgtcagatttaccggatggagagttgcagacattcttgcgggaatggtttgacgagaaaccttatgttgtgggacatacttccggttcaacaggtaagccgaaagaaatttgtttgagtaaggagggtatgcgtgcgtctgcacggattacaaatcatttttttggaatagaccgaaattctgtattgctgctgtgtctttcggtatcttatattgcaggtaagatgatggtggtcagggctctggaggctggagctgagttgtgggtagtgcctgtatgttctcatccgctgcaagaagtggaatggatagctggacgatcagtggatttggcagctgtagtcccgatgcagatggaggtctcgttgcatgataaaaaggaggctgaattgtttggcaaagtacggcaattgctgattggtggagctcccgtttctgagtcattggaaagccggttaggtgaattgtctactgtttcttatgctacgtatggaatgacagagacggtgtcgcatattgcattgcggaaaataggatatgaaaaggagtactttgctttagggaatgtgcggtttgaccgagatgagcggggatgtttatgtatagatgctccgcatttgcagcagcggcattttgttaccaatgatgtggtggagttgctggatgaacggcatttccgatggttgggacgttgggatcatgtgattctctccggcggcttgaagttttttccggaagtgattgagcggaaaatcagtgatttatttgatggacgcttttttatcgcatcacaaccggataaacgattgggggagcgtattgtattggtggcggaggggcatttgccgatgaatcttgatttgctgaaagagcagttgagcaaggtgttgactccttatgaaatgccacgtgaatttattgtattgcctcattttgcagaaacccgtacgggtaaggtgattcggacattcgattagtgggttattttccggtcgggatgattttttttgttttgataataaccttctgttcatctgccagtgttgtggcaaacaaataaatatctcctccttctttgacacggctgcgtttgcgtatttctgcaacggtcagaggaaagttgcggactgtgatattggcttgtggaatttgtttttctatctgtttgagaagtttgccggaaaagggcatgacatcttcaacaatgaaatgtcttcccggaaaatcttgacgtaagacagaggaagtatacagatgactgtgtcggtggagtttatttgcttcgtatctgatggctgttaatttgaatgctccgcatttcaatatggctgcatggggctcgtatagataatggccgatggttgtagctgtttgtaacggagcttctttttcttctgctaaggtgaagttgaaagactgtcggttgtctgtatattcgtgtagattgactgcatgaatcctgaccgtatggaaatccgaacggggagaatcaccttccaatataaaaagaatttccttgcattcatttttaacggctacaacatgtatctcttgtgtttccggaagtaggcgcagagtttcttccaaatcggccataggcgaaattttgacgataagccgttgagctcggtcaagcaaaatgggttttaattggatgatatccggttcgcaatcagtcagtgcaaatacccgtttgttgcagtctgcccgtcttgcgggatctatatagaaagtgtcggcatggaggtcctctataatttctcgcatgtctgcacagatgatttttatattatttattcctaatactttaaaattgtgcctggctgcatcacaatattggggaaaacgttcgacgtatgtcatctgttcgactttaccggataaaaaatatgagtcaactcccagacctccggtgaggtcgcaacagctttggccttttaccaaggtttgtttataatgtcctgttaactccgaagaacattgctcagtggaaagacgagacggatagatgatctcctcgttggcaaaccaatcgggcagtttttcacggacttgccggcgggcaaggatttggtctactgcaaaaggaatgtcaatatccggatagcgtttggatgataacagcagtttgtctgtatcttcaagggcatgtgtgcggataaattctttaagttcgggggatagctccatcatttgaaattttgtgacaaaggtagtaattaaatttttttattttaaaaggattatcttaactttgcaccgcaaaagagtgcgttgtgaaatatatcttaatgtgcatattgtttctggtgatggcttgttcctggtggaccggcaaggaggattgtcgtctggaggaaacgcaggatatagaatatgcggagagatataccggagaggctgagcagcaggaagacaagattgtcagtgtgttgatggcagccaacaaatgtgcagatgtgtctgtacacacacacggttctttcttcagccaaatggcccgaagataccgctctttaggaagttgttgggagaaattatttgaaaaccttgtttatggtcaaggtaattgtctgcatactacttttaaaattacatccgttctgtcggacgaatgtgatgcccgtctgaaaaatgcagggtattatatctatacgttgcgtaaaataattatttgataagagcattgttgtttatttttagaggaaaagacttgatagtattgagtctattatctctgtatgtttcttattttaaaaattattttattcaaaattactataccatgggaaaatataaaattattcacgaagatatcgaaaatattaattctaaagagattgtaaaacagaccaatatttcaggcatagcgattgttattatattgggagctttggtattgggagcttggggtatgacttttgacgaccctaattcttcaatgccaacctttttgtttactgctgcggcaatttttttcttaagtggagtgattaagttattggtgagtcgcaagcgttatgtatacttgcctactaaaagtgccttgaagttggaaactctttattttgatgttcatgcaagtgatgagttacaggcttgtttgcagatgaaacgttttgatgaattgtcactcattaagcgtgagaaagataacggtgtgaaagtagaagccatgctttctagggacggccagtttgctgctgtgcaggtgctggaatatgttccttattcttttgaagctgttactccggtaatgtgcttttataaagaagaagccggtaaattgtctgcggctttacttgccggtaaatgacgttgactaaggtgaaacgattgtttaacttttttttaaccgcttgtaagtgaggaaaaaattgtagacaatcgttttaattaatagttttgtgtcgttggaatgaatgttaaataaatatagttatggcagaagaaattgaaagaataaaatgcttgattattggttccggtcctgccggttataccgcagctatttatgctgcacgtgctaacttgaatccggtggtttacactggtatgcagatgggcggtcagttgacaactacaactgaagttgaaaacttcccgggctatccggaaggagttaccggtcctgtattgatggaagatttaaaaaaacaggcagagcgtttcggtaccgatattcgttttggaattgttactgatgttgatttttcaggtcatcctcataaagtgacagtggatggaagcaaacagattgaagctgatgctgtgattattgctactggtgcttctgctaaatatttaggtttgccttcagaagagaaattccgtggtatgggcgtaagtgcttgtgctacttgtgatggtttcttctatcgtggtaaggacgttgctgttgtcggtggtggtgacacagcttgtgaagaagcaacttatttggctggattgtgccgcaaagtatatttgattgttcgtaaaaattacttgcgtgcttctaaagctatgcaggaacgtgttttcaaaacacagaatattgaagtcttgtttgagcacaatacccttgaactgacaggttctgatatgggtgtggagggtgcacgtttggtttatcgtaaaggcgaaccggatgaagctatcaaagaaattaaaatcgatggtttcttcttggctatcggtcaccatccgaactctgaagtgttcaagaaatttgtaaatgtggacgaacagggatatatcattactgaaggcgcttctacccgtacaaatgttccgggtgtatttgctgccggtgatattatggacccgacttatcgtcaaggtattgctgctgcaggtaccggttgtcgtgctgctattgatgcagaacgttatatcggtgaattggagcacaaataaaaatatccgatgattgaatataatgaagcccggtatttatgccgggcttttgttatttgatggtgacaagtgttgcaccgtatccgtattgcttgaaagaggcatcttggtggtggtgacgcttgtattttctttgcagttcccacagtatgcgttggcgtaacacaccttctcctttgccgtggatgaagacgattttttgtcctcgttttaatttgtatttttccatcgttttgtggaaaatgtcaagctgatattctaaaatatctttgctgtccattccggcagtggtttccagcacttcgtttgtgtgaagatctatctctatgacatcgctgttcgttgtatgtgatggctgaggtgttgctggtgttgtgttatcaatatgttttttttctttcaaagcctcttttagctgctgttcgtcgatctcttccagttcaattaactgctctttgcttaaggggcggagtagtgaaatggaattgaaccaacgggcatgcttgtaggctccggccttacacagagtgacggtactgatttttacttctgcgtctatgggacttttaatcgtggtggttcctttttggaaaaatacagcttgtatgttcaccgctttgatgcggctgtctatatctttaatcgaatatagtcctaacgagcttgcagaatcaggcgggcagttgccggctacgatgccgttatacttgtcttcttgtcggaaagataccgagtagagacaggtctgtgcagtatcattgacgatgaataattcatagcgcgatgctgccaggttattaaagttgtccggtacaatggccaaatacagagtgtctgccgattgcatttgaacctgtttttggttttgattaccgacctgagagggcgcagaaggagcaaggtctgtatggatgactaccaagtcactgattgctgccggtatttcgaatccatattcgtcaacaaatacattgactgtagatttgtcaataatgccagttactttgccttccagcttttctgttaggaatctgacgatatcaccaattttgatattcataattataatactttgtatgtgatgggttcatctgaatggtgactgggacaatcatgatggtcgcacaattctccgttgtctttcagttcgcctttcagccatgattgtatgacttcttctaccggaccagagcagccgcggataacttgaatattgttgtttgccaatacgtttttggctccttcgcccatgtttcctgccaacatcaaagatatgccttcactggcaaggataggggcgatatttgatttgcatccgcaaccttccggagattcatgacgctctttggctatgatatttttgttttcatcgatggtgaatatggtgtaatattcacagtgaccgaaatggtcgtctactacgttgtttcgtgttggtatagctattttcatgatttattttgttttgattcatgcaaaggtaacaaatatactccgcttgttctaccaaaagaataaatttaaagtgtatcatgtaaattttggacgattttatagcgaaatcgtttgaaattattaatttagcggactgaaaattagataattcattaaaataatatcagatatgacacttcaagagtttcaacagtctatcagagaaggtattccgtcagaattgcctgctccgaaaccttatgacccggctattaatcatgccccaaagcgtaaggatattttgaccaaagaggaaaaacagttggcaattcgtaatgctctgcgttattttgaacctcgccatcatgccgtgctggctcctgaattcgcagaagaactggagaaatatggacgtatttatatgtatcgtttccgtcccgattatgaaatgcacgctcataatatttatgattatccgcataacagcttgcaggctgctgccattatgctgatgattaacaataacttggataaggctgtcgctcaacatccgcatgagttgattacttatggtggtaatggagccgttttccaaaactgggctcagtatcgtttggcaatgaagtatttgtcagagatgactgacgaacagactctggtgatgtattctggacatccgatgggactttatccttcgcacaaggatgctccgcgtgttgtggtaaccaacggtatggtgattcctaactattctaagccggatgattgggaacgtttcaatgctttgggcgtttctcagtatgggcagatgactgcaggttcttatatgtatatcggaccgcagggtatagtgcatggtactacaatcacagtattgaatgccggacgtaagatctccaagcatggtgaaggattggctggaaaattgtttgtgactgccggattaggtggtatgtctggtgcacagccgaaagccggaaatatcgcaggctgcgtaagtattacggctgaaatcaattcgaaagctacagaaacccgctatactcaaggttgggtggatgaagtgattgataatttggatgatttgatgactcgcgtacgtaaggcgaaagaaaacaaagaggtggtatctattgcctaccagggcaatgtggtggatttgtgggaacgcctggctaaagaggatattacagttgaattgggatccgaccagacttcgttgcataatccatgggctggcggttactatccagtaggtgtaagctttgaggatagtaaacgtatgatggctgaagaaccggagaaatttaaagagaaagtacaagagtctttgcgtcgccacgtggctgctatcaataagtgcgtggaacgtttcggtacttatttctttgattatggtaatgctttcttgttggaatcttctcgtgctggtgctgatattttgaaaccgaatggcgattttaaatatccgtcttatgtgcaggatatcatgggtccgatgtgtttcgactatggattcggacctttccgttgggtatgtacaagtggcgacccgaaagatttggcaaagaccgatgagttggcaacaaaagtacttgaacaattggcttctgagtctcctgctgaaattcaacagcagatgcacgataatatccgttggattaaggctgctggagaaaatcatctggtggtgggctctcaggcacgtatcttgtatgcggatgctgaaggacgtatccggattgcagaagctttcaataatgctattaagagtggcgagttgacagctccagtagtattgggtcgtgaccaccacgatgtttccggtacagactcaccctatcgtgagacttctaatatttacgatggttctcgctttacagctgatatggccgtgcagaatgtgattggagactcgttccgtggtgcaacctgggtttctatccacaatggtggcggtgtaggctggggcgaagtaattaatggaggatttggtatgttgttagatggctctgctgatgctgagcgtcgtctgaaatcaatgcttttctgggacgtaaacaatggtatctctcgtcgtagctgggctagaaacgaaggtgccgtttttgctattaagcgtgcgatggagtctaatccgaatctgaaggtgactatcccgaattatgcggatgataaattgattgaaagtctgttttgataaatcttttcagtgaaataataaaatccctgcaagcgaatgtttgcagggattttgggtatctggtgagtcttggttaaagcacttctgcaacaacgaaggtgctaccgccaatataaatcatgtcttgttttgtggcattttgacgggctgcttcataagctgtcgctacagttggataacatgttccatgcagaccggctgcctgggctttttctgccaatatctcttcattcatggcacgtgggatagaggccttggtaaaatagtaaatggcatctttgggtaaaatgcagagtacatggtcgacatctttgtcgttcaccataccgatgacgaaatgaagctgttcatattggcacttctgtaattgctgcacgatttctgtgatgccatcaatgttgtgtccggtgtcgcagatggtcagtggagactgggccagagtttgccaacggccgtgtaatcctgtgttggtaatcactcggctgatacctgtacgcacctgttcgtctgtaatctgtagacctgccgctcgcaatgccggaatggtttccaatacagtaggaatgtttttccgttggtagtcgcctttcagttcgcacgaaagattacagaactcttccccgctagaacgtttcaggtggtagtttccttccggattcttttccactttccattgttctccggcaaaagaaagggtggtgttgaccgaggctgctctttcttcaaatacaaagtcgtattctttgtcccggactcctacaatagcaggaattccagatttgataataccggctttctcttcggctattttttctaaggtgttgcctaaaagagccatgtggtcaaaggagatgttggtgatgacagatgccagcggagagatgatattcgtagaatccagtcgtcctcctagaccgacttctatgacagcgatgtccacttgttgatctgcaaaatatttgaatgccatcgctactgtcatttcaaagaatgaaggatgaatgcaggcaaacaaatctttgttatcttcaacgaaatcaattacatattgttcgctgaccatctcgccgttgattttgatgcgttccctgaaatctttcaaatggggcgatgtatagagtccggttttgtagccggcttcttgtagaatggaggccaacatatgtgatacggaaccctttccattagtgcctgctacgtggatagtcttaaagagtgtatgcggatgtttgaaatattcatccaatgcaagagtattgtccagattggctttataagcagcctgtccttccctttgatacatgggaagttgtgaaaaaagccaatttaaagtttcttggtagttcatgattctgtatgataaatgttttgcgtacaaatataaggagatttggagaattatattttcatgataataaaaaaatcactacttttgtgggttcgaaaacgaatgaaaagtctcttcgaaagagggacctagaagttaaggattgcttgtatatgaaagtagataaaaatgtacctatacccgtattgagaagaatgcctgcgtacctgtcttttgtgaagacattgcagaagcaaggagaaaaatttgtttcttctacgcgaatagcggagtatatggaaatagattctacacaggtgacaaaagatttgtcgcataccggcatctcgggaaaaacacgtgtcgggtacgaggtggatagttttgtgactgtgctggaggattttttaggttttagtcgaatggatagcgcattcttggtaggagcaggctctttaggtagcgctttgttgcaggataagggattgtcggcattcggtttgcagatagaggctgcatttgatactgataaggctaagattggcacgaaggtgaacgatatagagatctttcatattgaccagttgcgggtaatggctgccgaacggaatgtggtgattggaattattacagtgccggcagaatatgctcagaatgtagccgacctgatggtggcatggggaattaaggcgatttggaattttactccggcacgtatcaaagtcccttctcatatcgttgtgcagaatacaactatttatatgaatttagctattctgttcaataaattgtataatcaggaataataaattatataattattctatctttgcaaaagattaaaaataaactgcgtacgtagcgtagtgtttaaatagattgattatgataaagattaaatttccagatggaaatgcaagggaattcgagtcgggagtaaccggtcttgatattgcaaaatcgattagtccgaagttggctaaggaagtgttgtcaatttctgtaaatggcgaaacatgggatttgattcgtcctattacagaagatgctgaaattaagttgtatacatgggatgacgaagaaggaaaacatgctttctggcattcatctgcccatttgatggctgaagcattgcagcagttgtatcccggtacaaaattcggtatcggacctgctatcgataatggtttctactatgatattgagccgggtgaaggtgttgtgttgacagataaagacttggctgccattgaaaagaaaatgcttgaattagctcgtcagaaagaggaattctgtcgcatcgatgtgagcaaacaggaggcactcgaccacttcaatgcattgaacgaaacatataaggttgaattgattaatgacctcgaagatggtaagattacttactatcgtcaaggttcttttactgacttgtgtcgtggcccgcatttgccggatacttcttatatcaaggctattaaattgactagtcttgcaggagcttactggcgtggtgacgaacataataagatgttgacccgtatatacggtatcactttcccgaaacagaaaatgttggatgaatggttggtgatgatggaagaggctaaacagcgcgaccaccgtaaaatcggtaaggaaatggagttgtttacgttctctcagtctgtaggtgcaggtctgcctttgtggttgccgaaaggtgctatgctgcgcgaccgtcttgagtctttcttgcgtaaagtacagaaggagtatggttatcagcaggtgatgactccgcatatcggtaatgttaatttgtataagacttcaggccactatcagaaatatggaaaagacagctttcaggtgatcactactccgcaggaaggtgaagagtttatgctgaaaccgatgaactgtcctcaccattgtgagatttataaattcaaaccgcgttcttataaagatctgccattgcgctttgctgaattcggtaccgtttatcgttacgagcagagtggtgaattgcatggtttgactcgtgtacgtggatttacccaggatgatgcgcatattttctgtactcccgatcagttgaaggatgagtttaagaaggtgatggatattatttttatcattttcaatgcgcttaactttgaaaactttacggcacagatttctttacgcgatccgaataatcgtgagaagtatatcggtacagatgagaattgggagaaggcagagcaggctattattgaggctgctaatgagaagggattgaaaactacagttgaattgggtgaagctgctttctatggcccgaaacttgactttatggtgaaggatgctatcggacgtaaatggcagttgggtacgatccaggttgactataatttgccggaacgtttcgatttggagtataccggtgccgataatatgaaacaccgccctgtaatgattcaccgtgcgccgtttggtagtatggagcgtttcgtggctgtgttgatagagcatacaggcggaaaattcccgttgtggttggctcctgatcaggtggtagttatgccgattagcgaaaaattcaacgattatgctcaaaaactttcggatttattaaataattccgatattcgcaccgttttagacgaccgtaacgaaaagattgggcgtaagatacgtgacaatgagttgaaaaaaatcccgtatctcctgattgtcggtgaaaatgagatgaataacaacactgtttctgtacgtcgtcagggacaaggagacatgggtacaatgtccgttgaagaatttattgaaaagataaataatgaagtaaatagtcagttagagaccatttacagttataaataaactaatataaggaggatttaatatagcacaaagaatggaagtcagaggctcaagaaatcaggttagtaaagaacctcagcacagaatcaatgagtcaatccgtgcagctcaggtaagagttgtgggagaaaatatcgaaacgggtgtttaccctttacgtgaagccttggcaatggcagatgccgcagggctggatttggtggagatttctccaaatgccgaaccgccagtttgccgtatcattgattatagtaaatttctgtatcaattgaaaaagaaacagaaagagattaaagccaagagtgtcaaggtcgttatcaaggagattcgtttcggacctcagaccgacgatcatgatttcaattttaaattgaaacatgcaaaggaatttttgcaggaaggagctaaagtaagagcatacgtgttcttcaaagggcgttctatcttgttcaaagaccaaggtgataatattctgtctcgatttattgcagaattggaagattatggcaaagtagaggcagctccgaaattagaaggaaagaaaatgattgttgttctggcgcctaaaaaacagtaggccgccagaatatacagtcggtgaattcgcaggatatcggtgagaaccggataattatatttttctgaaacactttaaaattaagagaagatgccaaagatgaagacagtaagtagcgctaaaaagagatttactcttactgctactggaaagatcaaaagaaaacacgctttcaaaagtcacattttgactaagaaaacaacaaaacaaaaaagaaatcttactcatgcaactgttgttgacggacacaacttggagtctgttcgcaagatgcttgtaatgtaagaattaaagaaactagtttattaacctgggtgtcatgccgtaagttttccagaagaggaaacgctgacattcaaaaaattaaagattatgccaagagctaaaaatgccgttgcttcaagagcacgtagaaaaaaggttttgaaacaaaccaaaggtaactttggtgcaagaaaaaatgtttggacggttgccaaaaacacatatgaaaaaggtttgacatatgcgttccgtgacagacgtaaaaagaaatcagaattcagagcattgtggattcagagaattaatgctgctgtcagattggaagggttgtcttactctaaatttatgggtctgattcataaagctgatgttgacatgaaccgtaaagttttggctgatttagcaatgaatcatccggaagctttcaaagctgtagttgcaaaagctaaagaatttgcgaagtaattattgaaaaatatcctgagagaaggctgctgagaagcagcctttttctgtatcatctattgcgctagtttgggaataagtattaactttgcaataacttaatagatgtatcatatgaaaatagctttattgggctacggcaaaatgggaaagatgattgagcgtattgcgcaggagaggggacatgaaattattttgactgtagatgataaaaatagggaagattttatttctgaaaaactgaaacaggcagatgttgccatcgaatttacgatgcccgatgtggctgtagataattataaatggtgtatggaatgtggggttccggtggtatcaggcactacagggtggttggaacagtgggaggaagtaaagaaatgtgtgaaggagaagaatggtggattcttttatgcttccaattttagtatcggggtgaatatcttttttcgcttgaataagtatttggctaaaatgatgaacgggttcagtgattaccgcgtctttatagaagaaactcaccatatccataaaatggatgctcccagcggcactgcaatcaccttggcagaaggtatccttgataatctgacagcctatcattcatggaagttggatgaaggcatgccgatggagccggataccgtacctgtaacagccaaacgtatcggggaagtgcccggtattcatggtgtgacatacaaatcggccgttgatgaaatcgaaatccgccattcggcattctctcgagagggctttgcacaaggggctgtattggcagccgaatttatggtcggtaaaaagggactttataatatggacgatttgctttctgataaattatcattttgaaatattgtatgactatgagagatatcctgacgaataaatgggtgaaatttgggattgttatattcatctacctgttatgggcttattggattggcagttggtggctgttgatattggttcctgtaatttttgatatctatattaccaaacgggtacattgggcattctggaagaaaaaaggtgttgaaaagcagacgaaggtggttgagtggatagatgcgcttatctttgctgtcgtagcagcaacgttgattcgtatgttcttttttgaggcatatacgatcccgacgtcttccatggagaagagtatgatggtaggcgactatctgtttgtcagcaaggttgcctatggaccgaagttgccgaatacaccgttgtctgtgccctttactcaccataccttgccttttacagctagtaccaaagcttattctgaagcgattaagtggccttacaagcgtattgccggaacatccaaattgaagcgtgatgatattgttgttttcaacttcccggcgggtgacactgtgattgtgggaagggagaatccggattattatgcccaactgcgtgaaacggctaaaggattccgcttccaatatcccggaatgtctcagacggtggctgaaaaaaatgctcgtgattatatacacagctcttttgaagtgatttctcgtccggttgacaagcgtgaaaattacatcaaacgttgtgtcggtatgccgggggataagattgagttgcgccatcgccagttatatgtaaatggggaaatggcggataatccggaaaaactgcaatatgtctatgaagtgcgtaccaacggttcccgattgaataaactgaaattgcaggatatcggcctcgcttttgatgatatgattggtgatgagtcatattatgaattgccgctgacgcttgaaatggtcgaaaaattgaagaaattccctaatgtcatatcggttactcctctcgaagagactacccccaaagctgatattttcccgtttgatacgctgaattatccttggaacgtggataacttcggccctctttatatccctaaaaagggtgataaactggaattgaatctcaagaccctctctctctacgaacggattatccatgcctatgaaggtaacgacctgcaggtgaaggattctgttatctatatcaatggacagcctgcggatagttataccgtgcagatggactattattggatgatgggcgacaaccgccattgttcggcagactccaggtattgggggtttgttccggaagaccacatcgtgggaaaagcttatttcatttggctttcaatcgataaggacaaaaatttcctcggtaagataagatggaatcgcatgtttagatttatacattagaaaagtggtttttaccacttttttttgtatcttgccctaactaatgaaaaacatctcgccatgaaaacaaagggaaaaaagacatttgtgctggatacaaacgtgattctgcatgattacaaatcagtgtacaattttcaggataatgatatcatcataccgatagttgtattggaggaattggataagtttaaaaaggggaacgatcagattaattttcacgcccgtgagtttgtgcgtgagctggataagatatccgataaggatttttttaataagggtgcttcgctgggtaaggggcatggcaaattgtggattcgtccgggagtgccgatgtccgatcaaattctgcagtctttcaaggatgatactccggaccaccgtattctggctgtcaccgaggctgtggctgccgaacggaagggagagaaggtgattcttgtcaccaaggatatgaatttgcgtatgaaagcgcgttctctgggtctggaagcagaggattataagaccgatcaggtgattgacctggatttggccatcaaccatagcgttcgtgaaatcgatgattttgatgtttctttgattgatgaaatttacaagaataccaatggtgtgcctgtcgctaaggtttttccgggacagactttgaagggtaattcctattatatattgcgtaatggcaatgcttctgtgcttgcctgctatgatccttgtttgcaagtggtacgtaaaattgaaaagccgaatattttcggtatctatcctaaaaatgcagagcaggcttttgctgtggatgctttgatgaatcctcatgtgcagttggtggctgttagcggaaaggcaggtacgggtaagacattattggctttggcggcagctctccagcagaacaaggagtatgaatttatttatcttgcacgtccgatagtggcactttccagcaaggacctgggctatcttcccggagatgtcaatgcgaaggtcgatccgtatatgcagccgcttttcgacaatttgggatttatcaagcgccgtttcaacatgcatagtgctgaaaatcgattgatagatgatttgcagaaggaccagaagttgttgatttcagctttggcatatatccggggtagaagtctgtcggatgtttatttcattgtcgatgaagctcagaatctgactccgcatgaaatcaagacaatcatcactcgggcgggtgaaggtactaaaatggtttttactggcgacattgatcaaattgatacgccctacctggataagaaatccaacggtttgtctcatctgattgacaagatggagggacaggatatttttgctcacgtgcatcttgaaaaaggagagcggagccaattggccgacttggcaagtgatttattgtaaatatatatatttaacagatagaatatgaataaaacgtatctttttttagctgatggatttgaggatatagaagcattggcagtagtggatattttgcgccgtggtggagtggaagtactgacggttgcgattgcagatagtctggacgtgaccagtgctcatggaattgttgtgaaagctgacactcttttgaaagaggtgctctcagaaaaggctgaatgtcttgtttttccgggtggaatgccgggagctgagcatttgggaaattgcaaaccgttgatggaatggatgcaaaatcattatgaggcaggaggatatgtcgctgcgatttgtgctgctccggcaatggtgttcagtcagttgaaggctgggcgtcgtttgaaattgacaagctatccgggttttgaacaatgcttgccggaagcggatgtattggctgatggagtcgttgtagacgggcgggtaatcaccggtaagggaccgggattcgccgttccttttggacttggaatattgcgtgaattacgttcagcagaggttgctgatggcgtggctgccggaatgttgctcgcttgattataaatggcctgataagtctgtatccaactggcttgtcaggctttttacatgatgatgaaattaccgctcggaaattttcctacccacgagcatgcccagcgtccgttgcggtttatctcatacactcgattgaaaaatccttgttggccgatcagacgttccacacacgcccaggcggtatcccgtttgatgaagtccaggatttcctcctctatgcccgactggtcttcgccggtctcttctccgatacggtcttccatgtcgcacacagcttcatacacttcattgccgatagccagactcactgtctcgaaaatggcatcaatctgtttgtcattcagtttttccaatgctttttgctcaatggctgcacagttgcgcccccatacctccaacatctctttcccgtgtgtgtcacaagcttcccagacggtatccaccacccagtaggtctgcgagggttcgcctgtctttttcagccaggaaatggttttgatttcttggataaactgatctatcgttttctgttgttgaggagtccaaagcatagcggttgtctgttatatattgttccaaagattgtatctcatgcaaagatacgaaaattagcagttttctgctactatttctgccaagtcttttacaggaacttctgtactgtttttgccgaatgtttttttgcatagcggacaggctgttaccagcacatcaggtcggtaggcaagataggcattcagggcatcccggctgatgacggtgcgttgggctggactgatatgcgtattggacagagaaccgccgcagcagagtgatttcttgccgtcatagcgggtggaaatacgttggctgacggtttgcaacaccttttctggagcatcatatacgccattgccgcgtcccagttcgcaagggttgtggaatacggtcttcacatcgctctggcggggatgcagtgctttttcgctgatcagttgttccagatattcactgtggtgcaccacgcggatattcagttggtagtcctctttgaatgttttatagcagatgggacacgaggtcaccagtatttccgcaccgcttgcaacgatggctgctttgtttttttcgatgatgactgaagctgcatgatgattgcccgccagtagcatcgggcggccgcagcatacgcctcctttttcatcgataaaggtgtattcaacgcttgctttttcaaaaaggtagcgcatggattggatgacgtttggtgtcaattgacccatacagccggcaaagtaagccaccttggctgttttgagggcaggggcaggcacataggcataggtgtttttggtgatatgcgtatggtcttgacgttgactgagtcgcagggcattgagtcggaggtccaccggacaggcagcttcgcagcgtccgcacatcaggcagttggaatcagcctctgtatggttgagatggtggcgcacttttttcaggaaatacaccggttgtgtgtctttcatgcccaaagaggttcccagttgacactggtcgatacagataccgcagcgtgaacaggcgtatagttggaatttactgatggaggtaaattgacgcccttgttggattccccagttttttaaaaagatatatacgatttctgtcgggatatgcatatatcgggagaatggcagcagtaggaagaagagtcctaaggccgatgaataggcccaccaggccgggtaggccaagtgttcgatggggagaaaactgtcaaagaatgctcctgcatggtgggtcaggaaacctccgcctccgcgtactccgctggtgaagctttctgccaggaaacgcagcgggaatataagccataacaccgtcagtatcagtcggtcgaaaggccggtgtcttgtggtgcgttgcatgcccaatactttggaatacattcgtttaaaccatgccaatgccaatcctgataagatcatcagtagcacaaggtccatcagaaaggcaaaggtatcgctgtatgggaatgtctcttgtgccggatggaaaaagcggaagaagatagcaaagtaagggggattcaacagactggtatgatagaccagcgattctatttttcctatgacgattaagagaaaccaccccagaccgaaacacatgtgcatgtatccgaggaaggggctggtccggtatatcttgtggtgtaccagacattctaaaaatacctctcggatggctttaagggtcttgaggctgaacatatttcggaggattgtacgcttctcttcacgtgaaaatttacgaatccagcggaaataggtcactgccagataaatgagcagaatattcagtccgagggtgaaggggagtacaaacgggtcgtaatacatgatggtggattatagtgtttggttgtcgatatatttgatcatactgagaatcatccggcgggtgtccacgcctcgcgggcatacgagcaggcatttgccgcacagcatgcatttgtggagttgttcccgcacctcgtttgtctcgcctcttttcatcagcatctgcagtttgcggatattgaagtctgtgaacgagcctgccgtacaggtagcggtgcagcctccgcagccgatacaaagacgggtgcttgccacttcggcgtcgatttgttctgccatggagcggtcgtttttgtcatagtcaatgacgcgtgctccgttgatggaaaatccccagaaattggccatggtttctttttggttttatgggttattgttttgtggtcttcagataatgaatgatttctattgcagccgagcgcgcatctgtcagcgtatcggtcaggttcatgggggctgtgctgcatcccgcaacaaatactccctccacattcgtaccattagggatataatgtgggtctttcacctgcaggaatccattgggggcgagattcagtccaagttctctggcaagatatctgcctccatccgaaggctccatgcccaccatcagcaccatcaggtcaagtgtcatgcgcaatggttttcccaccagtgtgtcctcacacttcacatacagttgtttggattggttctctgacgcttcagatagacgtccccgcacaaatttgatgcggtatttctcttgtgcctcccgatagagttcttcatatccgggaccgaacatgcgcatatccatgtaaaaacagaagatttctgcctccggaagcatttcccgcagttcaatggcttgtttcacagctgtgatgcagcacactttcgaacagtggtagttgcatatcttttcatcccgggaaccgacacattgtatcagaccgatgcgttgtggggtggcgccggttgttgtggtgatgttgtgattggcaaacaggttttccaggtctaccgacgtaatgacattttcatagatgccatagccgtactcttctttgcggtgggcgtcgaaggtgcggaagcctgtagccaccagcagcgcatcgccttccagcagggctccgtgattcagttccaccgtaaatttgcccgttgtcgagcgggtggttttcaccggctcggagttggtatataggtggatggagggatgttgcaggtgctgtttcaattgctggcgcaactcttctgcctgtttccagttgggaaacagctgataccagttgttcaggttgccgcctgtttcacattctttttctatcaattccaccgtaattccggcttctgccaggcggtaggctgcttcacatccggcagctccgcctcctatgatgatgacattcatgtttttactttaaataggttggacatttcgggcgtcccatgctttcgcctctcaggtttttatattttgcttccggatcgtaggagatacccattttgtcgagcaggggctctacatttacctggtgcatctgcagaccgatttcccaagggtcatatcccaacaccagggcggctgcctcttcgtaagtcaacaccggtatgccgtgtccgtctttgccgtaggtggtgccttccatctcgctgatggtgtattgccatttgtccagaaacatggagcaacccggacagttggtgatgatgaaatccggttcgtagggctgcatcgattcgaattttttcttggagttggccactgaaaaaccacggttggcaagcaccaggtagttgcggaaaccgaatccgcagcagtgtctgcgttccggatagtccaccggctcgcctccccaggctgtcaccattcctgacagtactgccggaaattctgcacctccaatgccctttgtcgggaacatcttggcatagtgacagccgatgtggtccaccacccgcaggggtctgcctgtgtgtacatcggtcagactgtgcattttctgggctgctatttcgtggcggaatttgtagatgacatccgatgtatgtgccaggttcttaggtttctgaaactctctccgcgtagctttccataaatattcccgtgtctgttcctcaatctccggatgagtctcccaggtgtgcaggatttcagtgtagatgccgaatgaggtgatgcacgaaggggtcatgttttcaaatccggcttcggtcattagggcaaaatggcgtgccaccaccgtcatgatggtctccagtggcaccacatccgagtggtagccgataccggtacaggtggtatgtcgcgggtcgtcaaaaacggtcttgcccagacggttgcctagaatgtccagataggcccattccgaaccggggaaaaatgtctgccggatacagctccgggcatagtaatatctgtcatcggctatctctttctgatagtctttccatatttgttgtttgccttcgagattcatgattggatgttattggtgttgcccgttgtttgccatataggtatgtaggaaatagctctctccgtccatgcccatttctttggctttttccagtgagcggttctctatctgttccataaattctttgccgccggtcacttcaaagattttccggagttcttccatggattcgtcgtccactttccgtaacgtgccggccccctctttccggtagtttgagtgtacccgctcgtagaggtcatcgcggtgttcgtatatccattcccacacgggaccctgttccggatgcatctccggccgcacgatgtccggtgtcacgcaatagccgtagttgaggatgttgttgcccaacacgcgtttcagtgcaaattgctgacgtcctttctctgactctacgaacagtccctcttcctgcgacagtcggcgtagggccataatcactccgcccggagtattgctccgtggacagcgggtcttgcacgacatgcattcgccgcaataccagatggtttccgaacgcagaagggtctgcagactctcttcgtcctgccgttgtaccgtgtctacgatgatgcgggggtcgtaactgtaaaattccgctgaagggcagatggctgtgcacactccacagttcatgcagctgttcatgctctcttggtagtggatgtcttgttgaagtttctcggttaatttttgcataatgcccgtgaataaatgacctgttttatctcctgcaaaattaccggaaagtcggggctgtccaaacaatgcaaatgcgtattggacggtggtgtttatacctatgttgaaaaagccggatgctgttgggcatccggcttgcaggtcattcgctgattttatgtatggtcttcatcagttgttcgccaagaccgatggtgtagccttgcgagaggaagacgactcggttgaaggtgtcggctatgatgaagatgggcaggtcatcgcttttcagctccatgttttccataatcatccggcggatgctgttgtcgcggtctactccgtaggtgatggtttccggcagtgcgggaaattcatccgggcggaagctggcgagttgtttttcatccgggaagagcatcaccatgccgcgtccccatttttcaaagtcgcttttcaaagctgcgatatcacggatggcgtggttggtaggctcctgacgggctccgagtatggctacgatgaagtagccgcgtccggtggtttgcaggatgctttgtgcctctgttttgccttgcggggtaaatagtgcttccgaattgaagttgccgattactttcacctcgtctggattttctctcatcacaagtttcagacgggtgtttttgtctttttctatgttgaagaaactgactttgctcaacactccgccgctggccagacgcgttcctgtcaccagcatgtagtatcccgtgtccagaggcagaccgtttttcaacagtcggctccagcagctgcttttgtcctccgggaaggtgagcagtttgaatctgccgttctcataccgcgagagggtgaagtgggagtaatataccgggtcggtcaatgcctttacaggttggtagccggctgtcagtgtgccctgaggggtatttgcaggtgcggctgcggtgaagttgacatcctgccattctccggacttgttggcatattgggtcttgccggtcacttcgtctatgcgggccggtatgttcagactgcgcaaggctgcaacatagaatatgtcgcgtgaatggcggtcggcgcaacgggctttccatacgccgatgggagtcaccggtatgctttgcggattcagttcgtcatgtagggcgatgtgtcggttacaccattgggtcaggacatcgggattcgcctgtacggctgccgtgtctacctccttggacagctcttcgcgcagaaaagctttgtaggcacatagcatttcattcgagatgcgcgggttgagcacatagcggtcgaataggggatgggtcgcttcgggcgtttcgttcacatgggcggtaaacacctcctgtggtatgtctctcaggtctttgtccgacacctcttgcagcaggcggagggcgatgttgcgtttgtcctgttccaatgtttcgaaggaggcaatcagctcttcgtgattaccgcgggatgccagtagtattggtgtgaattttttgctttccagtcccagtgctttggcgatggtgtttgcctgttcggcatccggaaaggtggaggtataggcattgcggatggaatcttcttcagccatgcggcgggtgttttccgcccgttgttcgggtgttacgctcaccggtttgttgctctcggtggggggtacgatgtctaagtcttgttcgtttacctctccggcctgtttgtccagtacaacggtgagttggtttccttcccggaaggaaagttttccgaaaccgaattttttaccgtcggtcgcccagaccagcatatcgcccagaccggctgtcaggttggtttgtccctgttcattggtcactttgctggctaccgtgcaatattctgcatagttgtatattttgaaatcgacctgtgcgcctgccacggctttgccttgttcgtcggtgacggtcacggtggctggggtgcagggtgcatagttctcgatcacattgatttcagtgtagcagggtgtcacgctcatcacctcttccggtccgttatagcggccgaataccttggtgtgcatcagcataccgcggctggccggggcattgaaccagcccaggttgagcaccggctccggctcgcaggctcctagaaaataccatttcccgtctacccaagcctctacccaggcgtgattgtcatcggtatgtgcccagcggggagtgtagacctgtcgggcgggaatgcccaccgaccgcagggcggctaccagaaaggtcgattcttctccgcagcgtccgtaggctgtcttgactgtcgccaatggcgaactggtccgcgagtcgctcggagtatagatggctttttcatgacaccagtggttcacctccagcacagcatcgtatagggaaagtcccttcactcggtctgccagctcttcgtagaacacctgacgcgaatggtccagattttcgttgtttactctcaccggcatcacaaagtggcggaattcccgttctggcacactctttccccagggcatctctgctcgtgctcgcagggtataccggatgttgttcagccagaatgacaagtcgtagtctgtcacatcgccaatcggcatgtaggcgtagagaaatttgcacgcttcctcctcttccggtgtgagcttgccgtcactgttgagttggatatgggggaatagttgctgtttgtttgcaaagtcttgttctacaacctgccgttcctgtgggtctgtaatgaaatgacggctgttgcaggaggcaaggcttccgataaggatgatgcctgccagaataaggttatttagtctcatatttgattgtattgaatgttgacggataagaaaacctgcgcctctggcagaaacgcaggtttatatcggagacgctgtgcgtcgttttcccgttcctattttatgttgatgttgttgtaaaggaaacgcttgattttatgtgtcggagtcttttcaaaaggctcatgctgcaccagcaccagttgcagtttcgagaaattgtttactcgtgcgtttacatagttgaacagctctttcttctgctcctcgacatagtcactcacggcgctcttgtagttgcccgcctggctcttcagcttctggtactgcttttccagctcttccatgttgaagtgtaccatggccaccagtttgcctttggattctacaaccaatgattcgtttacgaaacggaagttgttgatgatagattcaatctcctccggatagatattctcgcccgacgaaccgagtatcatggtcttgatgcgcccgcggatggtcagtcgtcccttctggtcgatgctgccgaggtcgccggtcttgaaccagccgtcttcgctgaacacctctttattcagttccggttttttataatatcccttcatcacgttgggacctttgatccagatttctccctgaccgttggcatccggttcgttgattttcatctgtacgccttccatggcaagacccacgccttgcaggaatgtgtgtttcggacccgaaccggctgtcatgggcgcggtctctgtcagtccgtagccgatggcatacgggaatttggcttcacgcaaaaaacgctccaccaccggatccagcttcgaaccgccgattccgaagaatacgatttctccgccgaaggtctgcatcagctttttacccgccagacggttaagcagcttccgggtaggggcgaagttgtataattttttcatgaaagcattgctcgtgaatttcggcaacacctgttgtttgtagattttttcgataatcagaggcaccgacaacatcatggtcgggcggattttctgcattgccggcaccagcagtttcggggttggcacccgatccagatagtacacctgcgctccgaacatcagcggcagcagcagacccagtgtgttttcgaaagtatgagccatcggcaggatactcagaaaacggtcgctcggcacaatcggctggatggtggcgcactgtttcgcatcccacaccaggttgcggtgtgtcagctccacgcctttggaaaaaccggttgttccggaggtatagataatagacgccgtgtcttcttcttccacttccacagccggcaggggagtcaggttattcaggtcgatgttgttttccagtttttcaatatcggctgccggataaccttccggtatcactgcgaacgtgttcatcagcactttcttctccaaagtggccatccgtatatccgctaccagtttgtagagcaacttcgaaacaaagataatctttgcttccgagtgttccaggatgttctcgatttcgggtgtactgaatcccggcaataccggcacggcaatcgcccccacttgtgcgatggcaaactgcgtgatgccccaattgggcatgttggcactgagaatggctactttatcacccttcttgattcctgatgcgactagaaaattggatatagagagtacctccttatataggtcctgataagttcgcttcccgctttgaacaaagttcaaagacaaattgttcttgaattgggaacagctgttttgaagcagttccggtaaagtcaatttttttaagagcattcgtttataagttgcaatttgttggcaaagttactcctttttctcgaatatccgaaactttattgttaatttgttattaaaaagaaaggaaccgaaagctcggttcctcactttttcttatttcatcggaatgtttttcaaggtctctttcaggtagtcccagaatttcacaaccgacgggatgtttactctttcgtccggtgagtgcggtgagcagagggtcggtccgaaggagatcatgtcccaattcggatatttcgaacctaaaataccgcattccagtccggcatggatggccatgatggcaggacgggtgccatacatcttttcgtagatttcctgcatctcgttcaggatggctgaatccggattcggtttccagcccggatatccgccttcgaagttgatttcgtcagcttctgccagctcgaatacggcacggattgactgagccagggcatctttggctgtctctacagacgaacggagcaagctcttcacgatgattttgccgtctttgctctgtacgatggccagattgttggaggtctctacggtacccggcatggagtcgatcatgcgtaccggtccgttcggacaagccaggatagcgttggtgatgcggaactggctgcagctgtcgatgatgaacgacggcatttcggtagcctctgcgcttacgctcagggtcggttctttggcgctcagctctgcctggaagatagcctcggcctctttcacggctgcctgcagtttctctgcgttttctgccggcaatacaacggtggcaaatgactcacgcgggatggcattgcgcagtgaaccgcctaaaatattggcgatgcgcagacccagctctttcgcataggtcttcaggaagcggaacagcagtttgttggagttgccgcggcccaggttgatgtccatgccggagtgtccgcctttcagacctttgatggccagacggaaagctgccatgcctgccggcactgcctcctctttgtattggaacgatgccgagaagtcgataccgccggcacatcctacgtacagctcgccttcagtctctgagtcgaggttcaacaggatatcgccgttcagcaagcccggtttcagtccgttggctccgtccataccggtctcttcggttgcggtgatcaacacttccaccggtccgtgaggaatgtcggtagatgtcaggatagccataccggctgccacacccataccgttgtcagctcccagtgtcgtaccctttgcacgcacccagtcgccgtcaatgtaggtctgtatcgggtcgttcttgaaatcgtgaacggtatcctcgtttttctggggcaccatgtccaggtggccctgcaggattactcccttgcggttttccattcccggagtggcacctttgcgcatgatgatgtttccggcttcatccatgaaagcctcgatatggttttcttttgcccattccagcatgaatttgcgtgctttctcctcgtggttggagggacggggcacttgtgtcagcttgtaaaagttttcccaaatggcttggggctgtaaatctttgattgttgtactcatttttctatattttagatttatcgtttttgcatgtgatctttcaggtatttcacgaatttcgtgtagagctgcagactggtttttccgccgaagatgctgtggttgcggttggtgtagatggccatgtcaaactgtttgttggcctgcaccagacgctctgccagttcgtaggtgttctgcacatgtacattgtcatccgctgttccgtggcaaagcaacaggttgcctttcagttggtctacgtagttcatcggtgaattgttgtcatagccgctctcattttcttccggagtgcgcatgtagcgttcggtgtagatggagtcgtagtaacgccagttggttaccggtgcgatagagatggcagtcgagaagatatcgctgcctttcatgatacagagtgacgacatgaatccgccgaagctccatccccagatgccgatgttggcagcgtccacattgggctgtttgctcagccatttggcagcagcgataacgtcgtcgctttcgattttaccgagctggcggtaggtgcatttgcggaattcctcaccgcgggctgcggttccgcgcgggtctacacacaccacgaaaaatccctcctgtgccaggtagtccagccagttgaggctccatttgttcatcacctgctgtgagttcggaccgctgtattgggtaatcagtagcggatagttcttgccggcttccatgttcaccggtttcatcatccaggcattcagcatggttttgccgtctgctgcgggtatctggataaattcacgttttgacaaagtgtagtcctgcagcttttcgcttactttcttgttttcagccagcactctcaccgctttacctttggcattgtagagggtggtcaccggcggcagctcggtgttcgatgccacgttgatgtagtagttgaatgtcttgctgaagcttgcttcgttccagcctttggtcggggtcagttttttcttctgtcctttgatgttgatgctgtatatatatttttcaacgggcgactcttcatacgaggagtagtagaacagtttgcgtacggggtcgtatccgtagaagtcgatgatatcgaaattacccttggtcagcgcctgtttctctttgccgttcatgtcatagaggtagaggtgcatgtagccgctcttctcgctggtgatgacaaactgggtgccgttgtccaggaacactaggttgtccaagttgctctcggcaatgtagtatttgttttcctcgcggtagagcggggtggtggtgcccactttcacgttggcaagcagtacttccatcttgttctgatggcggttcaggcggatgatggccagctttttcggatccttggtccagtggatgcgcggcagatagatatcctcctcctcgccggtatccattttcagggtagtgcggtcgttcacatcatatacgtgtaccgacactttggaatttttctcgccggctttcggatatttatatgtatagttggaagggtagagtttgttggcttccagtgccgggctctgtccttcaaacatgttcatctggaattcgcgcacttcgctctcgtcaaatttgatataggcgagggcggatccgtccggagcccattcaaaggcacggttgaaggtgaattcctcttcatacacccagtccggcgctccgttgatgatgtggttgaacttgccgtcagaggtgatctgacgttccgaaccgaaacggaggtcgtggataaagaggttgttgttgcggacaaaggcgatgcgcagaccgtccggtgagaaggtggccagctgttggctgcctccttccgacagcggttttatctccttgttcttgaaatcatagatataatagtcggctgtgaacgaacgtctgtagatagggcggatgttcgtacagatcagcagtcggctttcgtttgcattgaaggtgtagtcttcgatgtattggatggggcagttttcgatttttgacaaatcgatcagctcgcccaccggcagccccgtcttgtagctgtattttacaatgcgtttgcctccgccttccactacggtgtagtgttcgccgtcattcatggagcgcaatccctgtactccctgggtacggaaagtcccggtaacaaaaaaatcattcaaactcaactgcttgtcctgtgcaaatacttggcagcacgccagtacaaccagcaatagcattccactaaatcttttcatgtctaattgtcttctttttttatttattttccgtccccaaaggtttaaaaaaaaacttgcttttgcaaatgtttgcatgagatttcattgcattatgaggtatctgttttgcaattcgtttggttttattacctttgccgtctaatttaagcgggtttatagaatatgatgcaatatactcttttggcaaaggataagaacagtgaggctcgctgtggtgttttgactacggcgcatggggagattcacactccgatttttatgccggtgggcaccgtcggctcggtcaaggcggtacacatgcgcgagctgaaggaggatatccgtgccgagattattctgggcaacacctaccacctctacctgcgtcccggtacggagattctgcaggcggcaggcggattgcacaagttcaacggctgggatcgccccatcctcaccgacagtggcggattccaggtgttttcgcttacggacaccgggcggaagattaccgaagagggggtcacattccgttcgcacatcgacggctcgaagcatctgttcacgccggaaggggtgatggatatccagcgtcgcatcggtgccgatatcatcatggctttcgacgagtgtccgccgggaaccagtgattataaatatgccaaatcatcgctcgaactgaccatgcgctggctcgaacgctgcgtgaagcgctttgattccaccgagccgctctacggctacgagcagaatcttttccccattgtgcagggatgtgtctatcgcgacctccgcgaacgctcggcagagcatgccgtgtcgctcaaccgggcaggatatgccatcggcggactggcagtaggggagccggcagaggatatgtatgccatgattgaggtggtcaaccgtatcctgcctaaggataagccgcgctatctcatgggggtgggcacgcccgagaatatcctcgaaggtatcgagcggggcgtcgatatgttcgattgcgtgatgccgacccgcaatggccgcaacggaatgatttttaccaccgaggggactatcaatatcaaaaaccagaaatgggaccgcgatttttcttccatcgacccgatggcgctggcttatgtcgataccgactattccaaggcttacctgcgccacctgatcaaggcggacgagattctcggactccagatctgttccatccacaacctggcgttttatctctggtttgtgcgcgaagcccgcaagcatatcctggaaggcgatttcgtggaatggaagaaggggattctcccgcggataaccagacgactgtagtttacgttcaacgctctatttcatcatgaagaaacttgatttatatatcatccgcaaattcctgggaactttctttttctcgctgattctgattctctgtattgtcgtggtgttcgacatatccgagaagttgggcaagttcctggagaacgaggtgccggtcaaggcgattattttcggatactaccagaattttatcccctatttcgccaacgtgttctcttcgctgtttatctttatctcggtgattttcttcacctccaagatggcctattccagcgagattattgcaatcctcagcaccggtatcagtttccgccgttttgtggtgccttatctgttttcggcttcgattattgccgtgctttcgtttcttttgtctgcttttgtcattccgaatgccaacagcaagcgcatcgagttcgacaagcagtatatgaacaagcgttatgccaacaaggagcagcatatccaccggcagatagctcccggcacctatatctatatgtcgtcttattccgtatcttccaatatcggctatgattttgccatcgagcagttcaagggcgatacgctggtcagcaaactgacctcttcgcgcgtcacctgggacaaggatagcagccgttgggtgattcacaattggaaactgcgcgaaatcgacggggagaaggagatctataccacgggcagccgcatcgatacggtgatggctttccagccttcggagttctccgagaatcccaagcgtatcaaggagcagctcacctatcccgagctgggcgaatatatcgaacgcatgaagatgaggggtagttccaacatcatcgagttccagattgagaaatacaagatggtcgccaatgcctttgccacgtttatcctcaccatcatcggcgtgagtatctcctcccgcaagattcggggaggaatgggatttcacctcggtctcgggctgctgatcagtttctcctatatcctttttatgcaattttctacggtttttgcaaccaatggcgggatgaatccgttattggctgtgtggttgccgaatattctatacacatttattgccattttcacctattggaccgcacccaagtgatattacttatataataatatattcaatcaaagatggaaaaagaattcaacaggaaccaacgttcctatcgtccgcggagagatgatagtcgggaggactaccagagcggaagaagatataacggcgaacgtcgcgaacgcagtttcaacaacggtgagcgtcgggagcgtacttttaataacagcggcgaacgtcgccctcgtaatttcggtgatggcgaacgccgtccgcgcactttcaaccgggaggataaccgccgggaacgcacattcagccgtgatggcgaacgccgtgagcgttcttttgatgcgtctgcccgcccgcgccgtccgcgcattcaggataaccgccgccgggaatatgttccccgcgaacgggctgagatttcatccgacgagaaggaggaactgcgccggaagcactacagcaaaaaaaagcagctggttcatcgtctgaaaaatgaggatgagaataccgaacttcgcctcaaccgctatatcgccatgagcggtgtctgctcgcgtcgcgatgccgatgagctgattgttgccggccgggtgaaggtcaacggtgaggtggtgcagactgtcggacagaaggtgaagcgttccgatgccgtggaggttgacggcaatgtgattgtacccgagcgcaaagtctacctggtgctcaacaagccgaaggattatgtgaccaccgtggaggacccgctggagcgcaagacggtgatgtcgctcattgaaggtgcctgcaaggagcggatctatcctgtgggacgtctcgaccgccagaccaccggcgtattgttgttcaccaacgatggcgacttggcgaagaagctgacccatccgaagttcgaccataagaaaatctatcacgtattcctcgacaaaccgctggaggaggcggattttgaagccatttccaacggcatcgagctggaggacggatttatcaaggcggacgaaatcaactacaccgctccggaccgtacggaggtgggtattgagattcactccggtaaaaaccgcatcgtacgccgtattttcgaacatttcggctaccagattctcaagctcgaccgggtctattttgccggtattaccaagaaaaacgtgccgcgcggaaaatggcgttttctgacggccagagaggtgaatatgctgaaagtgtactaaattttgattcatggaaacggaaaatatcgatttgtttgacatcctggagaaattgtggcgtcgcaggaaggcgatttttgcctggataggcggatgtctggttgtgggtgtggcgctggtttttcttttgccccgtcagtataaggcggagtgtatgatgcagtggaagctgtctgatggttcatgtcagatctctccttcgctctatccggatctcttttacagcgacgcttttatgcgtgaactgagccgccgggtgcaggaagtgtcggcggatggtgatacgctcactagcgacagattgcgcaaagagttgttcattgccttgaatatgaacgaaaactaccttacggtgggtgccgagaccggccatccgaagcaggcagtgcttttggcagaacaggctcgtctgttgttggaagagtatatccgtaaagagggcagtaaaaagatgcgggtagaacttgatgctgtagagaaacgctacctcaagatgaaggatgagttgcaacaccgccggcagcagctggtggagtcgctggagaagaccgcttcgctttcccctgtccgtcgtgaggtggagaaaaagattctgctggaggattacgaccttttttattcgctctattcggattgtgtgagcgaatacgagaagacacgcatccgttgtcaggacgacagtctggtactgaccgtcatcaagccggtggccgaaccggcggttccttccaaaccccgtccgcgcctgctcttggcggcagcgttgttcctgggtattttgttgggatgcggatgggcattgttgatgccggaacgtcgccgttagcaagtcaggttttgttgatataaataaaaacgcctccgcaaaggaggcgttttgtctgttaggagatataaacggtcggagaggtccgttttttggatcggctgaccgcaaatacatatatatgcattttgtcggatttccagttttcgggatattcaaaagaggaagaggctccctctgcacgggtcccgattttatgcagtctggctgtctttaattcctcctcgtaaataccggcatagatgacatcgtctcctgcgctcaatccgtctgcagcttgcggtgtgcaggtgaaattgatgaggctgcttgatttctcagccgaaaccttcggtgctgccagcactccgtccgatacgatgaactttttaaaatcaggtgttgcctgaaactggtcgtccacggcaatgttagccacattcagcttcgtaaacatattataggcagtcaggcggatcggtcggttgcagaatccggttgtgataatcggagcgaatcttcttgagagctcgatggcggcccccatgcgggcacgttgtttttgttgctcctccgtgcgtgggtttttcactttggcgggacgggtgcggatgattccgtccggaccttttttataaagcacggtattagccagtttattacgcaaagaatcgaaaatagcagaatgatatatagccataatttttaagaatttaaaatttaacaatgagataacttaaaaagaatgggagctatgatcaggcttcctgctgcgtactcccgaccgggagactgttgatacaatggtggtgatttctgtcattgtgtgctgcaaagatataatcaaaaatatgggatttccaaattttttggcaattatttttcgttttcaatgaaaaaatatttattgccggaaaaagcggacttctctttattggcaaaatagagatagagatgccagtctgtttcatggtctgccggcaggggcaatactgcctcctgggcacctctccggatatcgggaagggggaagatttcgatgtcaaaactgccgttgtctctcagccagaaggcctgcaggcggtcgttctgccgctccttggtcagttgttggctggaataccatttcagttgcacatggtcggggtccacccgccggatgctccattcgtagggcatctccagcacgccgcaggtcagttgcagccggctgtagtcgccgatccggtgctccatgtcaaacagcctgatgttggccttcacaaacaggttatagccggtggaaatcacctcccgggccacgagtttccagatatccgggatgggtgtatccatattggcgtgatagaacgacacgcacgccctcatgcggttcatctgcagcaattgggcaggttgggcttcctggtttcctctccggggccgttgccggagatactgtcggcctttgatgtagcagaacaccagctcgccgatttttccgctcagggctctccagaatttagatttgataatagccataaattttagaataaaagggtttgtcatcattttacgttcattttgcttgtctctccccataccgccttgctcctccgttgctcctccgtacctcccggcttctcgttcggacgagcttcgggggaatttcggaggacgaacgggaaaaggtgagaggtaagtgggaggtgggagagaggtggacaagagggtttacggacgctccgggctccactttcggtccagtttttcctgaaaccgtcttctgaatgcctccaggggaaaggccgctccggggtccagttttctcgaagtcacctccgaatggccgaggatgtggcggatgggatactgttcaatcagcagttcgcagatggcagccaccgactcgatttgcgcctccgtgtagcggtgccagtaacgggcatgtccgttttggcagtcggtgtacacctcgtcgggcatatactccttgttaaaccacgagaagaaacggccctgtctgcggtggagttcgccggcattgtccatttcgataccgatcgaccagcggttcagttgggtgcgtccttcaaactcgctccgtccggcatgccaggctacggtgtcaaacggcaacagctggatgatgcctccgtcacgggcaaccaccacgtgggcggaggcatccgtatccttgcgggcaaggtaatgggcggacgacagggcattgccgccggcggtgtaatggagcaggatgacttccgggtactccagtttactgctttgtttgtcacagtgcagctgcttcaccagtcggtcagctgcttcgcttttcagataatgatttttaatgaccatagttttttgttttagtgtacggcaaaggtacaccggcagaaaagtgacaattggctactagccgttttttcttattcaatgtgctgacatttattgagataagtggtctgtagctcttgcaggaagcgggtgggggcataccggtttcgctttttctgcagctcctggttcaggttggcggggcatttcatctgcaggagggtgcagaatgattcaaaccagtacttctgcgtgccttgcgggcaggtcggttctacaaaaagctgcagggcatcgagcagctccagcagttgtccgatgcctcctttccatcggaagccgggggtgacgggagtttgcttctgctgcagtaaatttttcatatacagcagaaaatggtattgcactccgataaaatgctgcagggcatagctttccgagcgggtcagctccgtcggttccaccggctggaaatggcgttgcacatcgagattggaatggacatacctgccttgttcgtcctcatggcatattttcagtttttcctccacatccatgcgcaacatctgctggaacagttggcggcgtttctcttccaccgaatggtaatatgaaaaaatagtgataagttcttcagtcatgtactcataaaagaggtctgcctctttaaatccattgaagatgagggggtgctcctgttcgcccgtcagtacaaccttggctgaataaaggttctttaaaaaattttcagctcgttcatttgtttggtattaggtaataaatagctttatgcaaagatactttcaaaaacaaaaaaatgcactctttctatcgaaaatattaaaataaatatggtagttacaatattttttatacttttgtccttaccaatagtggtaaacaaggtgtgtaactgatgtcgcaattcttaaactggtgtaacaaagcccagcttttctacaagagtgacgtaactgcttataaaacagagagatgttgttgtaagcaggaatagtaaatatgccttgttgctaaacgaagaagcctgatgaatggaacagaaacgctggtatgtcatgcgcgacttgaagcgtgcgaatgccaaaaacactgcttgcagtcagttggaagaggtgggaatggaggtttttacgcctcgggaatggcgggttcgcacccgaaacggcaagcgttgtcgcgaatatgtggcggtgttgccggatttgctgtttgtgcatgctgagcagaaggagctggatgctcaggtggagcgcatccccactttgcaataccgttacctgcggggcgggtattgccggccgatggtggtggcggatgccgaaatggagcgttttgtccgtgcggtgagcctgtcggacgagccgcgtttctatttgccgggcgaaatcaccggtgcgatgtgtagtcgccacatccggattgtcggcggtcctttcggcgggtacgaaggtaaattgctctccgtgcggggctccaaagtgaagcggttggtggtcgagctgccgggttttctgtcggtggcggtggtggtcaatccggagatgatagaggtattggaataaattagatgacacaataaaaacgaagaacaagagatgaaaaaacaaatgatgcaacgtatttttcagttgtttgttgctgtggcgctattcagcggttgtgcagcgcctaagattgcctattttcaggacgtatatgccggatcggcggcgcaaattgcaaccagtacggatattcgggtgcagccggaagataagatttcgattgtagtgaacagccgggatccgcttttggcaaatttgtttaatttgccggtgattacccggacgattggagcgacaacagaacagaatacattttatgaccgtgggatttccggttatacggttaataaaagcggtgatattgaatttccggtgttgggaaaaattcatatagaaggaatgactcgtgaggaaatcgcttcaaaaatcaaaaacgagctggtctctcagaatttggtgaaagaccctgtggtgacggtggagtttatgaatctgactgtttccgttttgggggaggtgacaagaccgggacgtttcaatattgataaagatcgcatcaccttgctggatgctatcgggatggcgggtgatttgacggtgtttggaaaacgtgatcgcgtgattgttcagcgtgaagtgaacggtgagcagaaagcctattttgtggatttgacttcggctcgttctctttataggtctccggtttattacttgaaacagaatgatatcgtttatgtggagccgaatgatttcaaggcgcgccagtctaccgtcaatggtaatacggttcgatcttcttcgttctgggtttccattgcatcgttgttgacttcgattatggtgttgattgttaagtaaattgttgtgatatgatggaaaatacagagataaataatttgcaggaccagccgggagagagtgtgaatctaatggatttgctgcatctgtgtttgcagaaatggtattggtttgcagtttctgtggtgattgttttggcattggccgctttttatctgttgcgtacgccgaatgactactcccgttcggctacgcttttgattaaggatgataagcaggggggaggtatctcttccgaaatggatgctttttcggatatgggattgttcaagtcttccagtaatgtcgacaatgaaatcattgcctttaaatcaccgtcactgatgacagaggtcatcaagcgcttgcaattggagatgaattactttactcccggtttttttcatgacaaggtggtgtatggcaagactttgccggtggtggtctcaatgcttgatttctcatctgaaaattcagcggtttttgatttacaggtggcaactgacagttcggtgattttgtccggttttgtgttgatggataaagacggagaggttgatttcggaaataaagaggtgaagggacatttgttggatacccttcctactcctttgggaaaaatgattgtcagtccggcagcggcatttgtacccggtaaggagtatgttatttctgtttcgcggacttctttgtatggagcggtaatgtcttattctaaaagattgtcggtttcgttggcggataaaaaggctacagctatcaatctggcttttcaagacaattccattgcccgtgcggatgatgtgttgaatactttgattaccgtttacaacgaaaattgggtggaggataagaatcagattgcagtgagtacttctctctttattaatgaacgtttgcgtgtaattgaaagggaattggggagtgtggacaagaatatttcttcttatagaagtcagaatctgttggtggatgaaaaggctgcttccagtctttacttgactgagagcagtaaaatcagtgctgacattttgaaggtcaacaatcagctttatgtgaccgaatatatcaagaagtatttggtggatgtcaacaaccgtaaccagttgttgcctgccaattcggtcattgagagcggtgatcttgcttcacagatttcggaatataataccaagatgttgcagcgcaacaatttggtggcaaatagtagcgagcagaatccgttggtagtggacattgatcaggctttggttgcgatgcgtcaggcgataatttcgtccgttgacaatcagattgtgattttgaacgagcagttgcgcagcttgcagcggactgctgaaaaaaatacttctcgtattgcggcaagcccgacacaggcaaaatatttgctttcagtcgagcgtcagcagaaggtgaaggaggctttgtatctttttctgttgcaaaaacgtgaggagaacgaattgtcgcaggcttttacagcttataatactcgtatcgttactcctcccggtggcagtaaactacctgttgctcccaaacggaatatggtgttgctggcggctttgatgttgggaattgccattcctatggggattatatatttgcttgaaatgatgaataccaaggttagggggcggaaagatattgaaaatatgacggttccgtttattggagaaataccatggttcggtgaacagaaacgttttgtcagttttttaggacgtaaaaaggttgctggggacgatgctaagattgtagtagaagcaggcaagcgtacgattatcaatgaggcatttcggatattgaggactaatctggaatttatggtcggaaaggataagggttgtgaggtgatattgatgacttcctttaatcctggcagtggcaagtcttttttggtaatgaatctggcagtgagtcttgctttgaagaaaaagagggtattggtaattgatggggatttaagacatgcttcggcttctgtttatgtcggttctcctaaaaaaggtctgagtgattatttgagtggacgaattgacgggtgggaagatatcatgacagtgtttcccggacatccgacattctcagtaatgcctgtgggaatgttgccgccgaatccgagtgaattgttgttttccgatcgtgtgaaaaacatgctgaaaatattgaaagaggattttgattttatttttattgattgtccaccggttgatttggtggcagatactcgtatattggcgcagtatgctgaccgaacattatttgttgtacgtgccggaatagtggaacgtagcatgttgggcaggcttgaacaaatgtataaggtgggagattataagaatatatccatgattttgaatggtaccattgctactggtggacgtttttcgtatgcttatggctatggtagtacttcctattatggggggggtggattaatctgataaacaagtagttacagtgttttgtttctttattagaaaacaaactttagccgagagcggcctttttcagggcttcacggaatggcactgccacctcctgtcgggggtggacgacggtatcaagacgttggatgaatcgctaaaaacccttcgcctctacgaagaagcaggcatttgtacggtttggctgactccccacatcatggaggatattcccaatactccggcgcagctgcgtgaatgctttggcgaattgcagcaggcatacaaagggcgtatcgagctgcatctggcagccgagcacatgctggatgccctttttgaggagcgtctggaagcagatgacttattgcccatcggtgaagagggaacacatttgctggtagagacctcctacttcaatccgcccatggatttgaaaggcatgttgaaacgcattcaggcaaaaggctaccatcccctgttggcgcatcccgagcgatatgtctatatggacgaacgggattaccatgaattgaaagacctggacattaaattccaactgaatatccctgctctcgccggcatgtatggcgagcgggtacagaaaaaagcacagcaattgttgaaatccggcatgtacacctgcatgggcaacgacacccatacccaccgattctttgcttccttgctggatgcgaaattaccggagaaagaattggaaaaattgtcggaaatgaaatgatatcttataagaatatgatgtttgcgtaattgaacaattgttgttagatttgttgcacgataatatttttgtaaggtaaaaagttaaatctttgattgtagtatgattacagatgaaataatagaagaggtatgggacaaggcgattgttgtagcagggtatgacaataccaatatacgcaaggatgcatgtggggcatggattatacgtagtcattacggtatgagagattctgattttggttgggaaattgatcatgtatatccggttgctttggggggagatgatacggtgattaatttgagagcgatgcattgggagaataatctttcaaaaggagatgactatccggcttacaaaacggcggtgcatgccgatggaaataaaaatgtacatcaggaaggacaatacacggtgaataaatctttacaacaggaattgaataagttgtatcagaaagaatagccatgaaaatagtaaaacttgttattgaaaaattattcggaatttattcttatcatattgactttgattcggatgaattctcattaaagcttataacaggacctaacgggtatggtaagactactattctgaaaatagtgtcggctcttcaggccaatgagttgtactatttttataagttgcgcttcacgtcaattgcattcgtttttgatgactcttccaaattggagattatccaacaggcggttaataatgacagggaattggcagacaatcaacttggagatatgcgtgttactcaatccaatcgcgtagattttttctggaaacgggaagatggagaagttgcacgtttttcgtataatgaaaatgatatacgcaaagtattgggaaaattgcgttatgatatggatactccaagagaaatccaacgggaaatccaacataaaaattggtcttcgcctttattggatgaatttttgctgcatagcgaagttttcaataacctgcttgtagaaaagaacggtcagagcggatttatgatgcagctacagttgatacgttctgcttatattccggctaatcgcatataccaagatgcgttttcaacagattcagaactgcctatagaacatgtggtagataaaatcagagataagttagggtttgtgaaaatgaaatattttacggaatctgtttctgatgattcaaagtttataaaagaaatacttgctaatagaggtttaagactctcagaagaagaatatctgttacagagagaaaaattacagaagctggtgacaaagtttgccaaatacgtaccgatatctattgatattcctgagtatagtgaaaagcattctgatattttatcttattatataaatcggttggttagtagatttgaaggtctcaataaatatatagataagtttagtctgtttgatgcgatgttgcgggagaaatctttttccaataaaaaagtgacattttcgcctcattttggaatgagaatagaatccgtaaccggagaatttattgatgtgacgttgttgtcaagtggtgagcaacatgaagtggtattgctttataacttgatatttgaagtaccggattcttcgattttgttggttgatgaaccggaaaattcgttgcatgtggcatggcagcaaatgataatttcggatttaatgcagatagccaagataaaaaagttgcagttgatagtggcgacacattctccgacaattgtaagctatggaagggattatgctgttgatttgttttatttgaacactggagaaagtttttgatttgaaatgaaaagcacagtattggagggtcggacggcaggtgcttctgtttttgaagtccgtcttttacttagcactattcaggggagtggtaaaatatgtgtagtcgttgaaggagctgatgatataaaggcatacggaggcttgtttgacaatagtaaagtcacattccatcctacgggctcatgtgcgttaattccgaatactatggatttagtatgtcaggatgtgcaattgaaagatagtgtaataggtattaaagatgctgacttcgaccatttgatgggaaaaatgtataataatagtaatcttttcctgacagatacgcatgatattgaaacgttgatgttgacagagagggtagaaaagaaagtgtgtttggaaatgtctggtaagccttgttccggtataaaggcaaaagcgatgcggatattgcagccttattcataccttcagtattataatgccaaggaaattctgaaaaacaaaggaaccggaggattattgtttaaaggtttcaaacctaatattgtggaagaaaatgcatatcatgattggtatcaggcagtgaaatctcatgggaataatgccagtaacgataattatccgtcagaggagcagttgtcacattttgtagaagagaatgaaacagatgatttgttgaacttgacaagaggtcatgatattgttcatttgatgggggtattgttacatgatagttatcctgaatgtagaaagaatgcatgtgaaaaaatagcagagtatatccgggttgcctatacattggaagattttcggcagacagatttatttaaggcgattgatacttggtcacaagaaagaaatatttcattatgggaggcataaggcggtattccactgtgtgtgaggaggtatagaaagagatgaacattaaataatatcgaggttatgttggaattacacgaacgatatgtgaatttctataccgattttgcttttaagaagctgttcggtacggaggtgaataaggatttgttgatcagtttcctgaatgctttgcttcaaggtaaagagcgaatcaaagatttgaagtatatcaatacggagaatttgggatctcaggagtttgaccgcaaggctgtttttgatgtctattgtgaaacagaggacggtcagcgaattttggttgagatgcagaaagcggatcagcagtattttaaagaccgcagcattttttattcgacatttcccataagagaccaggcagtaaaagggaatcattgggattatcgtttgaatgcagtttatacaatcggtattttgaatttttcttttgatgatgacgatcctaattactaccaccatgaggtgaaattggtagacacacatactcaaaaggtgttttatgacaaattgacttatatttatctggaaatgcctaaattccagaagttagagaatgagctggattccatgtttgaaaaatggctttatgccatcaagcatcttgcttctctgatggaacgtccggcagtacttcgtgagaaagtttttcatcatctgttcgagcaggcggaaattgcccgttttaatccgcaggaacgtatgaattacgaagaatcgttgaaaaattaccgagatttgtacagtgtgatgaaaacgtctcggataaaaggcgagatagtgggatacgatagggggtatgagaaaggcattgagaaaggtatagagaaaggtgagcatttgaagaatatagaaaatgccagaaatttcaagcaattgggagtggatgtatctatcatttctcaagcgaccggtctttcaatagaagaaatagaaagtttgtgataggaaaaaaatgttatagaaaggagtcaagtatgatttatatagcaaatccaatatatgatattgtttttaaatatctgatggaggacgaacgggtagtcaagatattgttgtctgcattgctaaagaagcctgtcgttgaggtggaattgcgtaagcatgaatattccaatgtgcaacgcgataagatttcgatgtttcgtatagactttggagctaaagttcgtaatgctgatggtagtcttcatttggtgttgatagaattgcagaagacttggcttgaaacggaaaccctgcgattccgtcagtatttgggagctcaatatgccaatcctgacaatatgctgaaagagaaggatcgaaacagcatgggaattccaatggtagcagtctatttgttgggtcatcgtgtaggtgacatcgaggagcctgtattgtatgtaaaacataatgccttcgattatgaagggaacgaggtgacacaaggtcttccggatccgtttgtagatagtctgacgcataatagtatcatcgtgcagatacctcgcctgcacggacatgtaaacaatcgtttggaggagatactcagtgtgttcgaccagacacgtaagaataaggacaatggtcaggtattgaatatcaatgagtcagaatatgtaggcgatgaagagatgatggtgattattcatcgtctcttggcagcagctgcagatgcacaggttcgtcaagatatgaatacagaggatgagttttttaaggcgatagaagatcgggatacggcaattatgttgcgtgacagacaactggcggagcaaggtcagcaactggcggagcaaaattctataattattgaatctgcccggcagttgaaggcttcaggcttggatgtcgagcagatagctgccattacgaaattgacaattgcagaaatagagtctctgtagaagagatagcaagattgtgatagaatgtttttattttggcggtgtgtgaggaggtatagaaagtaaatatatttttaaaagaaataattatgacatatcaggtattggatatagcgcaaaaattgatttataaggcacaagttgatatggcaaatggtggggatcgtcttacaaatctgaagcttcagaaattattgtattaccaacaaggttatcatttggcagtgtttggaactcctttatttgatacagaaattgaatcatggatgtatggtcctgtagtgccatgcgtatatgatacttattcagcgtatggctcttctgcgcttccggaagtttctaacgttatcacgttggatgatgatgaagaatcattgttcaatgaggtgtatgatgcatatagagagttttccgccattggattaatgaatcgtactcactctgagcgtccgtggacagatgcattaccgcatgataggggtacaatcatcaccaaagaaagtatgaaatctttttttaaaactcagttgcaataaaattgccatgggtaaaaatcatggaataaaaagacagacaccacagccatctctcataggatgatatatcaaattctgtgtggagtaggtcacatgtggtttctgccaatgttgaattggtgttttatcactgtgtatattttggagaaactgaagattaggaaaaatatagcagtaatgctactattattcttgtcggtaatatcataccttcccttgccattaagattaggtgctgctttatattatgctatcagtttttatataggttatcttatacagaagaatgattatacaggtcgaatagacggcaagaagacgattctaatcggagctgtaggttttatctgtttttttatacttaagctagcttttgcaaacagcgtaggtatacagttgtttgatattgaaatcttggataaagcaataaatctgtcactatcttcatttattcggttagtatgtgctgcttttgatatctgtcttttgtatggtttgttgagattgtttgtaagtactttattaataggtaattagttgggtgtgttcgcctgagcgaatgttgctttggagtttatttattccaacaatttgtgcttaaatttatatataattcagcatttcctcatatgataagttcttatattctgctgtggttatcatttgtaattgctataataatttctcttggttttacaattgtaattagaaaaagtaatgtaggaagaaagcttgtttgatataatgtatttgaatgttatgttagagttacatgaacgatatgtgaatttctataccgattttgcttttaagaagcttttcggtacggaggtgaataaggatttgttgctcagtttcctgaatgctttgcttcaaggtaaagagcgaatcaaagatttgaagtatatcaatacggagaatttgggatctcaggagtttgaccgcaaggctgtttttgatgtgtattgcgagacagaggacggtcagcggattttggttgagatgcagaaagcggatcagcagtattttaaagaccgcagcatcttttattcgacatttcccattagagatcaggctgtaaaagggcattggaattatcgtttgaatgcggtttatacgatcggaatcttgaatttttcctttgatgaagatgaccctaattattatcatcatgaggtgaaattggtggatacttatacgcaaaaggtattttatgacaaactgacttatatttatctggaaatgcctaaattccagaagtcggaacatgagctggaaacgatgtttgaaaaatggctttatgccatcaagcatcttgcatctctgatggaacgtcctgcagtacttcgagagaaggtttttcatcatttatttagtcaagcagaaatagctcgttttaatccgcaggaacgtatgaattacgaagaatcgttgaaaaattaccgtgattggtacagtgtgatggaaacggcccagataaaaggcgaagctgtaggatacgatagggggtatgagaaaggcatggagaaaggtaaagaagaaggaatagagataggcatagagaaaggtgaacatttgaagaatatagaaaatgccagaaatttcaagcaattgggagtggatgtatctatcatctctcaagcgaccggtctttcaattacagaaatagagtctttgtgagagtgtggcgattgtaaataaaaaggtatagaggaagttttaagtttgatttttatattatagcagcattaatggcagtttacattgtgacatatgatttaaaaggcgagacgacatctgattgttataataaacttatagctcttatcaaagaggaaggcatatgggcttatttaggaggttcttcttaccttattgaatctcatagaacaccggttcagttgagaaataaatttaagcaggtactgagcaaggatgatgttttatacgtcggtcaagtttctgcacctgcagcttggtatggatattcgcaacaggtgacagattggataaaggctaagttataaacatgatggaagacagtaagaatgataaaaactctttttggacacgcagaatctctatttggcatgttatttatgtgataatcattgcttttattatcaacatatttttgctttgtatattgccgggtagagtaaatgacgatgcttatcagaatttttcgtttgctgcaaccattacgtctattgttttggcagttgtttccatagtatattctcttcagtctgggatatcttcgttaggacagttgaatagtataaaagagatagagggaagaattggaaatgaactttcgagattttctagtcttgaaaattcaatcaagaatgctgtaaaggaaggaatttctccattggaggcttcaatggggagtattcagcagagacaggatgatatacaaaggtcacaagatgagttgcgggataattggaactctgttatagaaggttctcttagaatgacaacggggataagcaataataaagaggttttggaagaatcttttcttagtcaaggaaatgcccctcagatattttttgtcattttttatacgtgtgtacgaagccatgaaacaggaaaggatattccatttcacgttttacgaaaattttttggtgtgcgatcgtattattgtgagggagttattaaaagcatatcaatttttaatgcgggtaaactaactttaaaacaaggctcaaagcaaatgagaattgtggtagatagttatgacagccagtttttaggttcaaaaaaatggttgaaagaacaggttcttaagggaacaaatactcaattagggaaaagcataactcaggcattagatgaatactttgatatggaagaagaaaaagatgcagttttataacaatgataaaattgtttttgtttcagtagttattgttttatttttttagactttcaagacgattggaagattcttggattttatatatatagattgtatagaaatgttagatataataggacaagagaggacatcaattctcgtatttattaatattcttatgatgtttatttcatattggatatttaaacctgcattaatcaagccatatcgtatatctataatgcgtagaaatataggttgttttattattcttttattttgtctgtttgctttttggggtactgattggtttcatattgctgttgagtatgaggatttgagacggggaatgaaaagtcatcttgaacaattttatctgtatttgatacaaaatatatgtcctgattatattttatttcggtttgtagtttggggaagtgctcttgtttttttcagtaaaacagttaaatatttagggataaaaaaagatctggcgtgggtttgttttgtggtaattggtttattatggttttcttatgcgagggtaagtttggcgatggctatgatgtatttgggctttgctttgtataatgcagataacaagtcttttgttaaaaaaatatttgcagtattatttttggtaggatcttatttttgtcataaaagtgctatgtttggtattgctttgattattttttcttcttatgtgacgaaaatgaattttaaaatattattatttttaacattctcattgcctcttatttattttgctttagggaaatctttgatttattatatgaatatgcaaggtgatttggatgaaggagcatggggacaaagtttagtctctgcccaaggttatatgaataaggatgcttcattgcaaggaattggtttgatattacagcaatttttagaaaggacaacttatatatttactgcatatataggaatcaaagccgtcattaatgaacgtttgaagaaaatgatgcctcacagtataaaggttcttattaatttgttgttttatattgtagtggttgcttttttatttcagtttgattttggtgttaatacttcaactattgcagatagattttttaagttttcgtttattcctgcatctttggtattggcttattttatttcaaatgatatttaccctagaccgacgaaacgaatattattaattgggttgatatcaactttttatgaattgttctatagtttgtatacgtgtatgattagttgataggtttatggacattaaggataaaaaaaatataatatttggttttggatggacaacattatctactttagtttcaggattaactcaaattttacgattgtctatcttagctagattcttgaataaggaggattttggaattgttgctattttaacttttattttaggattaacgcaagtgttttcggatttaggcttttcggcagctatcatgtctgagataaatttatctaggaaaagctttttgagtttgtattggcttcaatttattgtatttaatggattgatgattgttgttgcaatgtttagtccttttatatcagattattatgagttgccagaattgcagtatttaattccatttgtattgttagagctgttttttttgagtataggaaaactctatgataccgttttgcaaaagaatatgctttttaaagtaatagctattcgtaatataacagcggctattatttcgttgattatagcagtttgtctggcatattgtggctatggaatttttagtctgattatttctactttatcgcaggcggctatagtaaatttatggaattttttcaaaggacagagtgcttatagaatcagtatcaaaaatgtaagaatcaaggaagctggtagcttaattaatgttggtctttatcaaatgggtactcaattagttgattatatagcatctaaattagatattttaattattagttcatacttgggagttggggctttaggtatttataatttagcaaaagaattggtattaaaatttgttatggtaatcaatgcaattactacaaaagttatgttacctgttttatcttatcaatcagataattatcaacaattaaaatatactttcaaacaatttttgtgtaaattatcctatcttaatactccgatcgttggttttatgtttcttttttcaccgttgattattgaagtgttttatggttctggatatgaagaagctaacgcaattgtctctattatgtcaatttggagtttgtttgtggttttggggcagcctaatggaatggtggcgattgttttgaaacgtaccgatttgtcttttttatatactgtagtgagattttttattatgataatcttgctatttgtttttgctcgtacttctttgtatgatgcagctttgactatgctttttacttatattgttatgtttattgttagttggcatatgttactttatagaattttatccataaagctaaaagaatatatatttatctttttgaattcgtggtctatggttttattcactgtgtttcttgtttttattcttagaacacttgatatttttgatggaaggtattcagaattgttatttgaatgtgtaatatattgtcttgtgatgttattgaatatattagttttatatcataatatgattttttcatttataaaaaagcgatatgaaaattagagggaaagaaattttattgaaacaatttatttgtttgatgctttattattgtataatgaggtggcttccagtgagttatagtaagatagggggggtatttcgaagaagttgagatatcttgtttgtaaaaatattttcaagaaaataggagataatgtaaatatagaacggaaagcttttttcggcagtggtctggagattgagataggctctaattcgggattaggaattgattgtaacatacctagtaacactattattggagataatgttatgatgggtcctaattgttatatacttgctagaaatcatcggtttgacaggattgatatacccatgtgtgagcaagattttctccctaaccagcagacagtaattggagatgacgtttggataggacgcgatgttttaatgactcctgggcgtacaataaaaaatgggtctatcatagccggtggatgtgtgttatgcaaagactttcctgaatattctatcattggcggtaatccttctcgtttaattaaatctagaattcaaatatgataaaaatcatgtttataacttcatctttcggaggtggaggtataacttcgtatgctcatgaagttataaattgttataagtcagattatgagttatgcgtagttgtggggtctgaaggtgaatttaaaatacagtcagatacagtacgagtttttcatatcgaaagtgaagatttgtcagtaataaatgcaaaaaatttgcttcggttgatatctgaagaaaatccacatgttataattaatagtagttctaagttagcttctttaattttaccttatatttctgatgatattgtttatatttcagtgagtcattctttaaagtatacggaagctgaaattgcagggtttaattctatatatagtgataagattatcgctttatctgagtatggtcggaaatatttggaaaagcgtttttccattacaaaagatgataaaattgtagctataagtaatttttcagagcctttggatattgatggtcttgaaaggaatagacaagaccaggactttagaattgtattttcaggaggcagtagtccggttaagactccggatttagtggcaaaagttttattatctctattgaagacaaatcttaaatttcagttttattgggttggaaatacacgtatggcgctttatcgtttttcttatttaaaggatatcaaacaactctttgatactgatccacgtctgcattttactggtcgtgtaactagaaatgaggctcaacggctagcctcaacagcaaatgcatatattttcccttcgaggagagaaggttcgccaatgtctttattagaagcgttgagtggaggtgcaattccgttagtggctgattataataatgcaaatcgtgaaattgttgaaaaaatggagataggctacgtgctttcaaaaaatcatccggaggagtttgtacagtggctttctaagttaataaatcgtgaaatagaccagcaatcgatgcattctaaaatcattgagtattatagaaaacattatactcgtgaagcttggggtgaaaagatgaacaatgtattacaggtaaaaggaagagaacataaaaaaagagacaatggattttgcattagaaaatttttatatgacagaatgagattacaattgaatgtcaggagaagtttttggagtgctttttataaagaaacattacctgcagtattgaatttaaacaaactatttataaaaaataatatttgatcatataattatgagattaatacaaatagtcaatacaatcagagcaaataaggttacaaattttttattttatccaatttcacatttatgtagttgcttaaaaaaagagtatacaaagaggaatcctatttattttgcatctcatagtcataaaatgttttatgggagaaaatttgattttaataatccccggacattgcatgaaaaagtctattggatgttatataacactgatgttagtttatggggaaaattgacggataaagttgctgtccgtgattatatcagacaagtcggttatggctccattttaaatgaggtttacaaagtttatgataatatgcccagtgaagaaaaacttttttgcaatcttcctaattcttatgtaatgaaaaccaaccattgtgggggaggtatggggatttacataattcgagatgctcataaaattgatagaaaaaaaatctatagaggtctaaagaaggctttggcttatgattatggcaccttaagcggtcaacctcattatcagaccataaagcctaaaattatggtagagaggttgttagttgatgatactcatcctaatcagggcttgttcgattataagtttttctgttttagagggaaggtattagttgtaaattatttaggggatagaggaattgatggacatgctaaactagttcattattatgatgtaaattggaaaagaattttgtgggataaaaatgagagttacactgaaaatgcctctagaccggaatctttcgagcaaatgttgaaaatagcatcggatttatctaagccatttccttttgttcgggtggatttatatgaaattaatggtaagccgatatttggagaaatgacgttcactcctggatttgacttgttttgtggcacgtatggagatcaggttttaaaaatgggtgagatgatagatttgtcacaagtgcagggcaagcataaatgataatatcaattatctatttaaggaggtgtttttatgaaaatactgcaaataagtaatgactttgcgggcagtaaggtccattctaatttgtataagaaattagatgatttgggtgttgaacaggttgtttattgtccgattcgttctgaaagtttgtttgattccaatagatttgaaggacagtgtataaattttatttatagttacgttataagatcttggtataaatttttgtatcactataagaaaaggattttatatggtgatatgaagaataaggttgatttgagttctattgatttgattcatgccgctactttattttcagatggtgccttggcttatgaggcttataaagaatatgatattccgtatgttcttgcagtcaggaatacagatataaatgcttttgcaaagctgcaacctcatacttgggcattcggtaggaaaatattgttgcatgcgagtaagatttattttatttctaaagcgttgcaatcagattttgaacaacttatgtttgttcaacccgttttggatgttataagagataagatggttttgaggccgaatggagtggatacatattggttagagcatgtacagaatttaccgacagaaggtaaagatgttttatatattggtgatttttcagataataagaatattatacgactgataagtgccattaaagaaattagattggaatctgaatttaaagatttaggtcttacgattatcgggggaggaaaggaacatgggaataccgttagcgatgctataaagagagaaaattttatatcgtatttagggaagatatatgataaatccaagttgggtgaggtgatgcgttctcatgctttgtttgctatgccaagtattcatgaaacgtttggactggtgtatatcgaatctctttctcagaatctaccagttgtatatagtgtcggtcagggtattgacaaattatttgacaacgaaaataatcctgtgggagaaggcgtggaggctaaatctgtgcagagtatcaagaatgctattcttttgatattacgtaatcgtaaaatgtattcgaatagacaagttgatttctcaatgtttgattggaatagtatagcatcttcttattgtgaggattataaatttattttaattgggtatagaaataatttgaattaatgtcggacaatataaaatagaaatgtgtgctaaaaaaaaatactttgttagtttttgtttggaaaatatttaataaacggggggggggaagttccttattatctgtattattcttggtggacaattataacaaaacctataaggaaatggttctctgctattgtgataccatctattccttttaataatttacgggtgcagtgttataggtggtgtggatataaaatagggaaaaatacgtttattggtatgcgttgttatttggatgacatgtgttatgatttaattgaaatcggtgacaatgtgactatttcgtatggtgttttttttgcttgccatgggaaaggtcaaggacataatcgaattcttataaagaatggtgcgtatattggtatgcgtgctacgttagtggctcgaaaagaagaaggactggttattggagaaaaagctgttgtaggctcctgtgcattagtgaataaatcagtagctgaagaagatgttgtagtaggagttccagctaagagtattttatgtaaataataggtatttttatgttatttgattgttgttttaagttgtgttgggttttattttacctgtgtatttctattacgatgtttgctcaatctgtgtctcctttttcttatggactaaggaatgcgaaatcaccggttgagacatatcgggtattgcttaaaactcatcaagaggctttaaaaaatcattgtcaggtagattattcgggtattcatgaattgtatatagaaattcctgaagacggagtttctattcctttggggggatcggttgactttaaaggaattaaattatatgtatcgaataaagcgaaggatatttatttatttagtttgcagcaaaccttaatgcctttgaatttgtcgaaagatgagttcgtttcaggaaggtatttgaatcattctaaatttagtgatggtttaagtatgctggtgattcaggataagaatttatgggtaaataatcgggtgggttatagttatggtgctacccggaaggatttggttcttgtgaaacaggggatggcgttaaacattcctgttgctccttatgatacggaaaagtcgcaaccgatattttattattgtaaaacgtcagaagatgaaaaagttatagagaatcttgattttatccgtacggcagattgttgttttaagacttactgcgtaaggattgagaatcaaaatcatgtgactttaagaaatataaagattaaaacaccggatagtgatctttatggagatgcggctattactgtgaataattctgcaaatacgaaattagaaaatataaatattgaaggaacttattcacagttaaaaacttatggctatggggtaatgttcaataatgtgtggaatactcggattatcggaatgaaagcttgtgcaaaatggggtgttttcgggacgaataatgttaaccaggtacaattggaggattgtgatatcaaccgttttgacattcattgttacgggcgggatgtatatatggaaaattgtcggtttataggtttgtataatcagtattcgtccgtttatgggacagtttatcataagaattgtatatttgaccaagctataccttgtttaatcgaaggttcttataatgcatatactccctttgatttgatttttgatagatgtacttttaaaatgtcggcacaaaaaaatacaattgtttctatgcacgggctatctgatgaaaagaactcaagacctgaattgacgaaaaaatgtattcccaatgtatacttgaagcgatgcaaattattggctttggaatcgttgaaaaattggcggatttttgaattgagatggaattgtaaattgactgaaagggtaggttattgttctgatatcgatatcagacgtttgcatgtttatggaaatgatgttgaattttctctttttaatgtaaatgtaagtactgaaaataaattggattgtcaatttaaacgttggaaagtaattcgtgattctttaaaatattaatcgtttttattatgcagaaaattaagattgctgtaatcggactcggttacgtaggtttgccgttggctcgtttgttttctacaaagtatccgactgtaggttttgacatgaatcagaagcgtgtcgatgctttgatgactggtcatgatgcaacgttggaagtggcagatgaattgttgcaagatgcaattgctaaccatggatttaaatgtacaacaaatttggatgatattcgcgactgtaacttttatgtagttgccgtgcctactcctgtagatgataataatcgccctgatttgagaccattatggggagctagtgaaacagtgggtaaggtaatttctaaaggggatattgttgtgtatgaatctaccgtttatccgggagtaacagaagaggagtgtttgcctgtcgtagaaaaggtgtctggtttgaagtttaatgaggatttctttgcgggttattctcctgagcgtatcaatccgggtgataaagagcataccgtagaaaaaatcaagaaagtcacttctggttctactcctgaaattgctgatgttgtggatgatgtttacaattctgtgttgattaacggcacacataaggctccgagtattaaagtggcagaagcgtctaaaatcattgaaaattctcagcgagatgtgaatatcgcctttatgaatgaattggctaagattttcaatgccatgggaattgacacgaatgatgtgattgaagcagcagcttctaagtggaattttatcaagttgaaaccgggcttggtcggaggtcactgtatcagtgtggatccgtattatttgattcagaaagcgcaagtatacggtgtgttacctcgcattatgttttctgcccgtcgtttgaatgacggtatgggggcttatgtcgctaatcagactataaaatgtatgaataagaagggtgtgatggtgaaggatgccaagatattaattttgggtgtaacatttaaggaaaattgtccggatgttcgtaatactaaaattgtagatatttattcaacgctgaaagaatatacttctaacataacagtatacgatccttgggccaatgctgaaagtgtgaaacatgagtatggtattgatattatatctgacggtattgaaaatttgaagggagagtttgatgctgtgatattaggagtagcccataaagagtttttgaatttagatatccgtagtctattgacaaatgaaaatggtgtcgtatacgatgtgaagggtatattagaccgaaatattattgacggaagactttagtctgttatgaattttgtactatcgactcttttggggaactgggttgatagtacctttttagaggagatgtgtatatgtgtattgatgtctgtttatgacaaagtaaaagttgaagagttacatctttctgtaccgagtattttgaatcagacatgtaaaaaatttcagttttttataggtgttgatggtccaatcaataaagagttagataaggcattaaatcagtattgtgtagataaacgtgtccggctggttagatttatggataatcgaggtttggcagcggtacttaatgatttaattgaattatcaaatcattgcgagtatttggcaagaatggatgctgatgatattgcattgcctcgaagattagagcgacaagttgattttttaaggaatcatcccgaagtggatgtgcttgggtgtgctgtggaggaatttgatgaacagcaaaatagtttgggcgttagttattatcctgagtcttctaaagagtgttatagatggttcgcaaaatggaatccggtagtacattctactgttatgttcagacgccgtttttttgaaaaagccggattgtataatgtgaattatttgagacaccaagatacaatgttgtgggtaagtggttttaaagcggggtgtaaatttgccaatataccggaggtgcttatgagaataagtacacctcatgatttatttaagcatcgattaggaggttggaaattggcatggagatcatttaaggatagaatttggattaacagacagttaaaatatggggtagaagcatattggtatgcttttatgatgttcgttgcaatgattcgtcctgtctggtttaaggggatggccatcaagggaagataatgttttattatttttaggttattatgttgtcagttatttgtcctatatataacgaggaaaaatatatagcgaattgtattgaatctattcttttacaagattatcccaaggatgatttggaggttatttttgtggatggcatgagtaaagatcgtacgcgagaaatcgttgcaggctatactcaaaaatatccatttatccggttaatagacaatcccgagaagattgtgccttatgctatgaattatggcatcaaggcatctaaaggggaggtgattattcgtttggatgctcacgctacttatgaaaaaaattatttttcttctttggtgcggcgtttgaatgagttgaaagctgacaatgtgggctctgtctgtaaaacggatgtgttgaacaaaactcctaagacattggctatccgtgaagtgcttagtaataagtttggagtgggaaactctgtgtttagaacaggagttgataaagttatggaggttgatacggtgccttttggttgttggcgtagagatgtttttgaaaagtatggtctttatgatacaaggttggtaaggaatcaggatattgagctaaacaagcgtattttacgaggcggaggaaaaatttttattgtgccggatactttttgtacatatttggctcgtgagacttataaagggttgtctaaaaacaattatggtaatggaaaatggaatattttgactgtgcattatacaaagcagtttaattcattgtctttacgacattttattccgcttttgtttgtgttgtcattgattttacctgtcttattttcgttgttttatcttccgctgattttattatcagcactctctctgtttgcgtatgtatctttgttgggcgttatcagtttgaggttgacaatccaaaagaaacttagtttgttttatttgttagtgagtttcttagtgcttcatctttcatatggatgggggtcattggtcggaatttgtcaggtgttatttcttcctaaaaaataaaataaatagatatgcaggagttctattttaaagataaaaaaaatggcactgcatttatgggtatatgtcctaataatgatgtgaattgtcttccatttgattactttcgatatggtcatgctttgttagttgcgcgtcagtttggtgatgtgctgaaaataaaatctcctattcccattccagaggaaatggtgtaccgttttattcttgaaaatacggataagatgataaatgatttgatgtctaaggctccttgtaatgcgaacctgcagaaattgctcttagacgataaactttcttataaagagcaaaaaaaacttctgagaaatcaagtgttgacaccaacagatttgttatggctaaataaagatgcacaagaacaagggtatttacttgatgtgtaccatgaagagaagtatcctgaaaaatttaatcttaaaaagcacccggcttgttattacaaacaagaagataattcaatagagacatttggaccttcagacatgacaggaggagaaatgagagcgttattggaacaaaggaaagtcgtgcaagcccgagtgtaccataagggggagcattggcattgcttttattttacgtctaagggtcttcttggtctagaatcaggtttactaggctcaaagcctcattatcattacctgtcagataaatcggggattacacacgaagatttaaaaaggaggattaaagagtgtgatatgccctcttctggggctcatattataatagatagatttcattagactggagttgagaataaaaagagggattagattatgatgataaaatggatttttgaccggacggtagcattgttcggtctgcttttgttatggccagtgttgctcatcgtggcaattttggtaaaggtaaagatgccgggtggtcctgcgttcttcgtgcagaagcgtgtgggcaagggaggcaagttgtttaagtgccataagttccgctccatgacggtgaatcataatgggtctacggtgtcggtagcgggcgactctcgcattacgccgtttggtgctacgttgcgtcattataaactggatgaactgccaggtttgtgggacgtgttgattggtaatatgagttttgtgggaccgcgtccggatgtgccgggctatgccgacaaactacaaggcgacgaccgcgatgtgctgaaattgcgtccaggtataactggtccggctactttgaagtaccgactagaggatgaaatgattgctgaatacgtagctaagaaacaggctgccggtgacaagcgtcctatgcaggagattgctacggaatacaatgacaaggtgatatatccggataaagtgcgcttaaattgctactactaccgccattacagttttgtgaaggatatagagatgatttttgctacggttttgggtaaacgcattcattatgcaggcgaggtgatataggagttgtatgggttgtagtatgatattgtcaactgtctgtggatatgaataatcaaatatatgacatttatgaaaagtaattacacaaaaaaaattacccttagatgtataacatgtggtggtgaagattttgaatttaatgaggatagaagttacattaaatgcaacctctgtaatagagagtattttggaggatatgacgaattggttgaactaaatgaagaaacaatttcagaaggcttggaggcgtttaaagcagaagttcgggatgatattgaaaaagatatcactgatatgtttaaaaaggcatttagtggaaataagtatattaaattcaaataactatggagttagccagtcttgttgttgcttgtgtcgcgtttgcatttagtgtgtttacttttcttttctatgataataaattgaagaaacaggaacataggttaaatgaataccaacttaaaaagaatgagtctgaagagattgaaattaaaaaggctcaaattagaggtaatatagtgaaaggagaaaaaggcaaacggacattgaaagtgttcaattcggctaaatcaaaagcgttaaatgtaagacttgagtttatcagtgatacgaatggaatatacgtaattaataatccattaccttataaattattaaatcctcaggattctactgaaattattttccttttgactatagaacatccagaaacaatagaaataaaatttatatgggatgatgattttcaaaaggataatgaatttactcaagtattgacactttagttttatatggataataatcatttaaaacatacggataaaatagaggatgtagacatttctaatcagtttaaagatctgcctgttggggaattgatttgtggtccccttaaagctgttgttgatgcccagaaaaatatggctgaatttacttccaagtttataaaagaggtcggattgaagaaagatgagtctcctcgttatgttgaatttgatttgcaaaaaaacaataggaggtgattggtaacaacaaaaaatagaggtatctgttgactttcagatgaaaaagacagttacagaagaatctgaatacaagaaggatgaggaggtcaagggactgaagcttggaggctatgaagtaattgcttacgtatatatccattaaattatgtcaattttattgatattatttgtgacggtgtatgagttttgtttttatcgctatatttgcagtgacatataatttatatgtatatggaaaagattgataaggatatctatgttgttaataaagaatgtgacagtattgctgtacattataacatgcagaataatagttgtgttatgaatgcaacaatagaatctgaatcaaccgttacttttttgcaagctgttaattatgtgtcaaggcatgttggtttaaaagtgaatgttgaaacttcatctttacaaaaaggaagtgtagttcgatgttttcgttttgttattgaagaacaagacaagaattattggctattgtatatttttatgacgttatttaaatacgttttttttcaaaataatggagaatttgatttgaaaattaatacttttagtaaagaggaacagaagcagttgcaggatgttttgaaagagaaaagattgactgatgaaaaaataaaaaaaatatcttctgattatgttgtgataaggcagcggagtgattttttcaaacggattgcaaaaagaaaagatatactaggaatttctattgaaacaggagaaaattttgactttaagtattgtgacaatttgaaacaaataagtgcaaaggagtttaacgattttattgtagaattactccctgaagaaataattgttgaaaatgcttgtatttacattttgagtccggttattctaaaagggcaaaaagtgaaatggaaaggcgtatatgaaaatcgagtgataacatttgaactaaaatctaatgagtttaaaactatggctcaaaatggtttggggtttcgatcaggttctaatattatttgtactcttaaatataagaagcgtatagatcgaagtggcaatgaacatttttcagattatcaagtcattttagttttaaaatatggtgttgatgataattacgaagagactatagagggtaagaagaaaagaattgaagataacagccctacattgtttgatgggttagaatattaattttacaatccatgaaaatagagcatatcaaaataaaagagttgtataaagagtggaatttagaaacttcatttgacgaacgtgtcaatatattgtcaggtattaatgggtcttttaagtctacatctttgcgtttgatacgtgacttgttaataagtaagagtcgtaatacaactaaagtatctgaggttgaaataaagtgtagtggttgtataagtgttttttataagcattttgaggatagtttgcttgctttgaaaaaaataaaggatgatgaattgcttttagaactggcttctcaaatacaagctgattggaaaaatgttgatgaaaagtccttgtctcaacgtgtgttaaaagctgatattgttgcttttaaacaggatggaaaaaaaatgtctgttaaagattttgatcaaatttgtaaggtggatttcatatcaacctttgatatgcctcaagatggcgagagggatgacaatgcttcatatttggattttcaattgaagaaattagaaagtgactatgcatattatttgtcagatttagctaaaaatgtcactgataaaattttatcagagggtaatatggatttgaaaatatttgatgagatatataggcagaataaattgtttgtttctattatcaataatgctttcaaagatacgggtaagaaaattgatacaaaccaaagtaaattagtttttaatatcgatgggcaagatttaagtagtagaaatttgtctagtggtgaaaagcagttgcttatcattatgttgacagttttgcttgaaagagagcaagaatatgtcttgttgatggatgaacccgagatttctatgcattttgaatggcaatgtaagttgatagaaaatattcttgctttaaatcctaattgtcaaatcatattgacttctcattctccagctttgattatgaatggatgggaacaatatgttttggatatgaatgtaattcgacaaaaataagagaaatgtctggattgacagattatttaacgagtgactttatagggcatttgaagtattttgctttagatagaactcgagatattgtaaaagtgtatgtggaaggagaatccgatatttgtttttgggaatcagctttaaatgctttgggagatagttctaagtatagatttgatgtagtaacctataagttagataataagagtttggaatttgatgctcctaacggaaagtacgcattggttaaaatgcatgaaactttaggaaagaatagaattgtgtgtgttgatgccgattgggatttattgattgatggctattctatatattctgatgtgctccgccataacaagtatattataaatacaacttattattctctggaaaatgtgttgttaagtccggaatttcatgcttcgttgatgcataagctaaatatggaagaggaaagaacagaatatattaatttattaaattggatttctcgtttatgtaaaaatattttctttttgatgctcacctatgttcaagaagattctcatggtagaggtttttggtttaatgaatttagtaagtgtataaatggaatatgtgtgaatgatttgggacgtgaagatagaataagtcattatatgtgtaagtggaatgtgttgttgggttctaatttttctgagcaaaaagaattgatagaacaaaagcagaagatattgacagataaaggttatgctgttgaagatttatggaaatttatgcgtgggcataatttatatgcttctgttgttaggccttggataaagagaaaagtgacgtgtgatattgaacgtaagcttacaaactatcggaagaaaaatggaaatgaagatattaaggagtatcgtaaaggtttatatgccgctttaggagattttaaaagcgttgaagaggcaatagatttttctttttacagaaatttctctgatccagtgtggttgccagatgaaatgagatgtaagattatttctttatatgcttgatttttcaatatgtttgttttgatgtcgatgtggtttgctgaaatataaaattttgaaataagtggagagtaatgtacgaacgatatgtgaatttttttactgattttgcttttaaaaagttatttggcacagaggagaataaggatttgttagttagtttcttgaacgcttctttgtgcggtaaggaggttgtggtggatttggaatatcttgatatagagaagttcggaaatcctttatttgtttctggtacgattctagatgtttgttgtaaaactatggatgggagaatgttttttcttgaattacagaatgttggtagacaattttgtgatcaaattgtgttggaaaataaacatgagggatgtctggagcctgcctatacaatcagtattttagatttttcttttgatgatagcaggtctgcctactatctttatgagcaatctcatatttatctggagatgtctaaatttattaaactggagagggatttggaaagtttgctggataaatggatgtatgccattaagaatatgatgattttgtctgaacagcccaaagctttatgtgagggagtgtttgccaaattctttgaagctgcagaaattgtaaatttaaatccgcaggaacgtgcgtattacggagggtctttgaaaaattatcgtgattggtatagtgtggtgaatacagcaataacaagaggacgagaaaaaggattggttgcaggtcgagttgcaagagaacgtttggagaaagagcaaaatattaggaatttaaagtaatcaggaaatagtatataaaatcaggtattctgtaatatggaattttgacgttgatattgatttgaaacgtcgtaaagaggctgagttattgataaaaaatgatataccttcgctattggtttgtggttaggttgtctataacgaaaaagcaaaggaggaacttgtaaaactgggtgttgatgagaagaaggttgtcgtgcagtatgggtattatagaaaggatgaaagctgaaaaagtaaaaatgactcctgcaagaactatgctgatacagatgtttgttgatttaaatattaatggggagtttgcgtctgtttttgctgctgagaagttgatttattttatgcagcgtttgggagcgaagagttattttaaaatagattttaaaccttattattatggaccttattccggaggtaaggttgctcatgtcctttatcatttaaatggaagttacattaaaggtatgggtagcatggaaaaccgtccgtttgattatatatggttgacagatggtgctagccaagatgcaaaggactttatagatggatataaggataatagtttgcgcatgatttgtgatagaactaggaagtttttgtatggctattattctaattattcattggaattgctcgcatcggttgactatctgttggaaaacgtaccgtcattgaagaattggaggaatgattatctggatgatgttttggatattttggaacaggaaatttcaaaatggagtgagcgtaaagaaaagatgtttaaacgggatttgttatctgttgctgtttgttacctgcgtgataatttatccgtcaattatatttgttgagttatctgatgttttttatggtatgaaccattatgaacttgattaattagtttgtaatggttatttttgccgaaaatgatgtgttaagattttggttgatttatgaataagcgtatttatttgtgcctggcgcatatgtcaggaaaggaacaggcctttattcaggaggcttttgatacgaactgggtggtgccgctcggtccgaatgtgaatggttttgaaaaggatctggaggagtttgtgaaggaggataagaaggtggtggcgctctctgccggtacggctgccgtgcatcttgctttgattgcctgtggcgtgaagcccggggatgaggtgatttgccaaagttttacattctgcgcttcgtgccatccgattgtgtatctgggggcaacgcccgtgctcgtggacagtgagccggagacttggaatatggacccggtgttgctggagaaggtaatcttggatagaattgaaaagaccggcaagaagccaaaagcgattgtgccggtgtatctgtatggtatgcctgccaaactggatgagattatggcggtggctgataagtatgagattccggtgattgaggatgctgccgaagggctcggaagccgatataacggtcaggtgtgcggtacgttcggacgctatggggtgctgtcgtttaacggaaataagatgattactacttccggcggcggggcattgatctgtccggatgaggaggcgaagcaacggattatgttttatgcaacacaggcccgtgagggattcccttattatcagcacgaggagattgggtataattaccgcatgagtaatatctgcgccggtatcggacgcggacagatgacggtgctggaggagcacgtgaagcatcaccagcgcttggcggctctctatgagcagttgctggcagaggtggatggggtgactttccataagagcccgtcggagaagtatgattcgaattattggctgaatacgattacactggatccgcagttgaaggtgaagggggaagaggaggcgtatgcgcaggtggtgaccggtgctgtcggcggtgcggcaggagtgacgcatgcagccgcttctgctcatacggattgtgagccgaatcggaatgtggaggcgatgcgtatcgctctggataaggcgggtatcgagagccgtccgctctggaaaccgatgcataagcagccggtgtaccgccatgtgccggcttatacgaacggtgtgagtgaaaatctttttaaggtggggctgtgcttgccaagcggaccttgtgtgagcgaagaggatgtagcttatattgtaagtgaaattaaaaattgtcttcatgcttaattctattttatcgaaactttcttcttggtatttttctaaaaatgccctgccatactggggtatcctgattggggattgtgtggtggtggtaggcgcagagatgtttgtgtttgcgctgaataacggcattgtgtttacattgcagaattttggacatctgttgtttacttttgtctgttatctgcctttttatctattgggatttaagttgttgcatacctattcgggggtgattcgttattcttcgtttgtggatttgcagcgggtcggttttgccatggctatcggatgtgcactgacgatgggtgtgcagttgtttttgccgcagatgtcctggctgatggatttgcgtatacgggatttgctgttgggggctttgctggctacctgtgtgatgtggtttgtgagggtgatggtgaagtatatgtatgatgtgacttatcacagcaagcaggcgaagccggtgtttatctatggtgtgaaggaaggcggtgtggggctggcaaagagtatccgcaatcaggattcctccaggtatgtggtggcgggatttgtgtccgacgagaaggatgtggagaattgttatatgttgggcgtgaaggtgtatccggcggatgagaagctggtggaggtgatgaagaagcggggcgtgaaggtgctggcggtgtcgccgctgaagaatgaggctatccggaataatcaggagatggtgaatcgcttgttggaggcgggcatcaagattttggtgatgccatgtgcccaggagtgggacggacacagcgatttgaatgcgatgtcgctgaaggaggtggcgattgaggatctgctgccgcgcgataagattgagatcgatctggaggctgtggggaatctgttgaaggataagaagattttgattaccggtgccgccggcagtatcgggagcgagattgtgagacaggtggcgactttcggccccaaggatttggtgttgatcgaccaggcggagacgccgttgcacgatatccgcctgatgatggcccgggagtggcccgatattcaggcttatacgattgtggcggatatctgtatgaagcaacggatggaggagttgtttaagctgcatcaaccggattatgtgttccatgctgccgcctataagcatgtgccgatgatggaggataatccgggcgagagcgtgcgtaacaatgtgtggggaacacgtgtgattgccgacctcgccgtgaagtatggcacgaagaagtttgtgatggtctctaccgataaggcggtgaatccgacgaatgtgatggggtgctcgaagcggatctgcgagatttatgtgcagagtctggataaggcgttgaaggacggtaaggtgaagggcgaaacgcagtttgtgacaacccgcttcgggaatgtgctgggctcgaacggttcggtgattccgctgtttaaacggcagatcaagcagggtggtccgattacggtgacccacaaggatattatccgctattttatgttgattccggaggcttgtaagctggtgctggaggccggaacgatggggaaaggcggggagatttatgtgtttgatatgggtaaaccggtgaagattgtggatcttgcccaacggatgattcagttgagcggcgccaagaatatcgagattaagtttaccgggctgcgtgacggtgagaagttgtatgaggaggtgctgaatgaggaggagacaacgaaaccgacctatcacccgaagattaagattgccaatgtgcgagagtatgagtatgcggatgtgctgaagcagattgatgagctggtggctgccagctacgaggaggatatgcaggttgtcaagcacatgaaggagctggtgcctgaatttaagagccagcattcgaagtacgagcagctggataagtaatagacgattgttttgatagaacaggggctcatggtttacggctttgccgcgccatgagcccttggtgttttatgccgtgaggtggttagaagagtcctattttcaggatgctcagcatgatgccgaatcggttttggagcaggtctcctttgtcaaagccgaggctgagggtggtggcgaagggaaggcgtttttccggggcggtgagttgtaaaccgaagctgaactgaggtttgctgatggcattgcctgcttcgtcctgaaaaggggcactgtggcgaccgtagttcaaggagtagctgcacagcagtttgtattgaatatccagcagcggcaaggctccgctcagtccgaaatggtgggctagaacgcggttgttgtaggtgccgcggatgatgccgtcggtggctggggtcggcgtgataaaggggagaccgatgatctgtccgtaaagactccagccggatggatagccgccattattgaaatagttatcggcacctcctaatatgactctgtccgggaaggggtcggaggggtctttctgggcaatctcttcttcagtggcgggacggtcgtgaagggggccgctttggtctttggtgtagtagaattcgtagacaaagcttttaaaccaccggtcgctgtctttgcgggtgaggtagagcccgtacagtccgtccggtgcatttttgaaacgtccgccggagccgtcttcaaacaggtggttgtagtagaaggatatgccgagtttggggtttccgtagttgatgcggacgaagtagttgccgatgtggttgcccagtctgttgatctggtcggaacggctggcgttttctccgccggagaggacgcataccagtttgacgtagtctttgagggtgtagcgatttttgcctgccggacccttgccgccccattgggcatagtcctctattcctccttcaatgctgaaatggggggagaaggtgatttttccggctgccattttgttgtgtacccgggtgttttctacatagcggttgtcgagcatcatctgttcggcatatctgaatttgaaggagagataacggcctacttttccggggagtttgatgtagtcccaggaggccagggagatgcccggcatgttacggctgttgttggagtagagcaggtcgccgttggtggctgaaagtccgtcatagcaggtcggacggtcgaacaggcctacgttgagggtgaggttttgccatctgattttgccaaacagttggttgacgaagatccggttgtgatattgacccagggcacctgtgccttctgtacccaaggagtagtcaaaggcgcgggtgtcggatttggcgaaatcggtgaacagaccgaccttcccccacaggtaggtgtcgggggctattttgtttctcgtgttggtgtgcagccagaagggtttggctgctgttccaccgcctagctctgcccggtagttgacatggtgtttttgtgcctttacagcacagcatggcaatatacctattgcaataagtaagtaaatccgtttcattgtttttttctaagaattttcacatcgattttttagtgctacaaagatagtctatttttttatattttcttatctttgtgataactaacgtatgtagctatggaaaaggaaagatacattcattttgactgggccatgaagcgtatgcttcgtgacaaggctaatttcagcgtgctggaggggttgttgacggtgttgctgaacgagaagattacaattgtggagctgctggagagcgaaagtaatcagctggcattggacgataagttcaatcgggtagatatcaaggcaaaggacagcaagggggagattattatcattgaggtgcagaatacccgagagatttattatctggagcgtatactatatggagtggcaaaggcggtgacggagcatatttctttgggcaactcttatcaggaggtgaagaaggtgatttcaatcagcatcctttattttgatatcggtcagggacgcgattatctatatcatggttattcccgttttgtgggcgtgcatacgcatgatgagttgctggtgacttccagggagcgtgatgccatcgtccgtaaatcccccaaggagatatttccggagtattatctgatacgtgtgaatgagtttaatcaggttgcccgtacgcccttggaggagtggatttcttatttgaaaacaggggaaatcagtgaggacgcttcagcacccggtttgccggaggcgcgagaacggttgcgttattatgatatgaagccggcagaacgtcatgcttatgacgagcatatcaatgcggtgatgattcagaatgatgtgttggatacagcgaagattgagggtcgtgcagagggtcgtgcagaaggtagggcagaaggtcgtgcagaaggtcgtgcagaaggtcgtgcagaaggtagagcagaaggtagagcagaaggacgtgcagaagagaaaaagcaaaatgctcgcaatctgaaagccttgggggttgccttggaggttatttctcaagctaccggtttgacgaaaaatgaaattgaggagctttaggtgcgattgttttatttattgaatgtaatcagggctcttggttttcggttttgccgtgccaagaactctgatgattttatttcataatccggatttccggtttgatgtctttacttaagctcttggtgactgtgatgtttttgggacccggaatcagcggactgttctccaatacatgacggacacgcttgtattgttcgagtgtgaattggttgaggtaggagaagtcgtagtccatgatgttgtaggatacaaaggggagaccgtcacaaccggtccggttgaatagttcttgttcctgcattccttccttaagactcgctatgtattcttcccggttgtagctgggggtgtcatcgcaatagtcggtctcttcacagtctttttcgccaaatacgtggagaagtcccaggtagtggcccagttcgtgcgccagggtggtgtaggctcgctcttcgttgatgtggctgttgttaagcacaatgccccagggcactttcggcagttgggtgtagtagtagttgttggcttgcagaccttccagactgttctgacggggagtcagggccaggtgggaaactcccaagagatctttctgggtgcaggtgaaaaggtagacattgacgtatttgttcggatcccacatgagtgaggcaaattctgatttttcctgagaaaggaagttgtctgcattgtagtaggccagaatggagttctggatgcgttcgatgccggcttccggcaatgcttcgcctgtgggggtctcggtggccagaacgagttcgacattcatgtcgatgctgttgtgaccgctacggtagaggtagttggcgcgatcgaccagagcgtggagcacttcggttttgacgttctggatgctgtcgttctctttgccttgttcgtagatgacatggaagatgaccggcagtcggtagtggtagtcgccgcgcaaggtgtcttgattgacgatgacgctcacttcgtgaagctggctgacgaagcgaagggtggtggaacgcggcgtgccggtgttgttggagtcgacgctgatgaccaactggtcggtgttgattccgttttctttgttgacacgacaccagtcggtttcgttttctacgctccaattggtgttgctgttgacagtcagcagccaagcccccggacgaccggagaaactgatgttatgctcggatgttttcaatacctgaggagccggacggtcctctgcacacgagagcatccagagtagcggaagcagaacaattaaaaagaatctgtagttcattgcttttttggatttgtttgaattacaaaggtaataaaaagttatggtttagcaaaatacctatttgtagggattgtgtttttgtgtggaattgttttatttcgcatgttaattgtatatttttttgaatggagatatgaaatacgctggaacagataagatgagtgatttgatctgcgagaattataatctgctgctggtgatgagccggttcgggatttcattgggtttcggagatcagactgtggaacaggtgtgtgagcaacagggggtgcatacgggtactttcctggcggtggttaattttatggatgatgagtgttgtgtgccggatgatttcagaaaggaactttctattgaggcactggtggagtatttgaagcaggcgcattcgtatttcctggagtttaagctgaaggctatccgggagaaactgatggatgcttttgtgtctccggaggatgaggtggcaaagctgattatgaagttttatgatgcttatgtgcatgaggtggaggtgcatatggggtatgagaataaggtggtgtttgagtatgtggataagttgctggagggggagttgtcggaacggtataatatcggtgtatttgtcagaagacacaatcagatcgagacgaagctgacggagctgaagaatattctggtgaagtattatccggtgaaggcaaataataatctgctgaacagtgtgctgtttgatatttatgcctgtgaaaaggatttgtgttcgcattgccacgtggaagattatatgtttgttccactgattatggaattggaaaagaaagttcaggaccatgcaagaggatgatgttttaaaaattgcgattgcagagacttcggtgattgtgcgaagcggactggctttggtgttgaagcgtatgcaaggtatgaagattctgccgattgaggtggtgtcgcaggagtcgctggccgattgtatgaggttgcataaaccggaggtgctgattattaatccggccttcccggggtattttgatgtgaggaagtttaaggaggatccgatgcatggcggggtgaagtgtgtggcgctgttgtgttcgatgggcgacagttcgatgttgaggttttatgatgagacgttttcgctttatgacgatccggaaacactgaaggagaaggtgaatcgtctgatggatgtagcgggaccggaggtggagaccggaggacaggatgtgttgagtggacgtgagaaggagattgttacctgtgtggtgaagggaatgacgaataaggagattgcggatgctctctttctgtcgacacatacggtgattacacatcgcaggaatattgcacggaagctgcagattcacagtccggcaggtctgacgatttatgccattgtgaataagctggtggaaattcaggatataaaggattatttatagtatgaaaatttggtggatggccttgatgctgggagtgaccggctgtaaggcgaaggttgagaagttgcctgcagagttgcaggcggtggctgatgtggtgccacgaaatattgtgattgcccatcggggaacgacgttttgggcaccggaggagccgcagttgtttccgggaatggaggcggatctggcgagggagctgacccggttgggatggtacgacccgaagggcagaccgctgaggtcggcagagcaggtgttggatgaattgtaataaaaaagccggtcaacagaccggctttttatgtttgtaatgttgtatgtgattatttaatgatttcaatcatagcacaacggttccatttgttgttgtctttgtagtacggtttttcttttcctacatattcaattttcaaacggtcagcactgatgccgtactctttggtaagcatgttagcaattgcttctgctcttttctgtgaaatgcgcatgtttacctggatggtaccgaatttgtcagcatatcctacgatgcgtactttggcatctttgttgtctttcatatactgtgcaatgttgtataccaacggttcgtagatgtcttctacttttgcactgttgaatttgaaaggaatggtagccgggatgaatagttgctctgcttctgccggtacctctacctctttgattacttccttgatttgtgcaggacggttttccaattctgttactttgtttgctaaagcacggttttctgctgccagacgatccatgtcggcacgtctcggagctacacggaaaccacggcctttgaagtagtaggtgatacctgcggtcaagcctgccagtccgtcgttcgggaatcctcctttgactaccatgtcgtcgtcaaagatcaagccctgaaattctacgttggcatcaaagcgctcagacaatctgaattttccctgtacaccggcgtggatagtgaaggattggtcgtgtttgcgagtcattccaccgattccgacaaaaggtaccaggtcgaatacgcggtcttctttatattttgcaaaaaagttaatcaaaccgagcataacatctccctgtacgtgcatgtagtgcatgtgaagcatgccgttggctcccagattaaatccgtgaagagaaccgccacctccctgaagacgtacgcctaaccaaggattgaacattttacctactgcaatctgaggcatgaaggtgatggtgcttttgaattttgcatctccagagttttcgccccaaaaggagttggctccgaagtttgctgatacaaaccagttgtgccaaaatttgttggcttcaaatgtggtgcgatagcccggaagacgtacttcttcagacgagctttggctttgtgcctgtgctgaaaaacagaaggctgcagccactgcgagtaaggttaattttttgttcatgattttgtttatttatgtgctttgtttttttgtgtttttattgagatgcaattttataagtttttaatgactctgccgtgttagttttgatgaaatatatatatatatattcattatgtttgttgatatatgtgtgattttattaattataggttatatttaacaaaacattgcatgatgaaaagaaaaaaataagttgaggggttgtttgtttgtgtgtcggaaaattatttatatctttgcggcagtttcaattccacctgtttctatgcaggtgattatactacaaatatattatacttaacccttgagatagtctatgtacgacattctgcaacttaatgacaaattactggctgatttgcgggtaattgctaaaacgttaaatattaaacgtgtcgaatcttataaaaagcaagaactgatatataaaattcttgaccaacaggctttggtggctgcacaggcggctcctgtggaggaggaacttgttgaagcagtgcaggaagagcctgctgtcgagaagaaggaaagaaaaccacgggcccgtgtgatgagaggcggcgtggagaaggtgggggattccaaaggcggtgtcggtaagtttgtgcgacgcaacaatgaggcgagaaagcctgaaatgaaaaacgaggaggctaaagtggaagctggtaatggcgagatgaagcctgttgagcagccgcagcaggaggagcagtcacgcagagaagaaaaccggcgtgaggagtttaaacagaaaccttttcagaaggaggagcgtcgagagtcttttaagaagcagaatgtccagaaagatgatgctctgaaagaaagacctcattttatacatcaggatattatagaacaggatctgggacttgatttgcaggatgattttgaaggggatgtaaccgattttcaagaggaggagatgggtgaacaaccacagcagatggagggagcggatgtaaatgtgaacgaaaatggcaatggtaatggaaatgggaatgccaatggaaatcggatgcgttttgacaagcgggataagtattatgagtttgaaggtattattttgaattccggtgtgttggaaattatgcctgacggttatgggtttttgcgctcgtcggattataattatttgaattctccggatgatatatatgtatcgcagagccagattaagctgttcggattgcagaccggtgatacggtggagggtactgtgcgcccgccgaaggagggtgaaaagtatttcccgctgattaaggtggagaagattaacggaaagtcgccggatgctgtgcgcgaccggattccgtttgaccacttgactccgctgtttccggatgagaagtttaatattaccggtaatggaaaggctacgctttcaacccgcgtggtggatatgtttgcgcctatcggtaagggacagcgcggtttgattgtggctcagccgaagaccggtaagacggtgttgttgaaggagattgccaatgcaatcgctgccaatcatccggaggtgtatctgattatcctgttgattgacgaacgtccggaggaggtgacggatatggctcgcagtgtgagggctgaggtgatttcgtctacgtttgacgaaccggcagagagacatgtgaaggtggcgaatattgtgttggagaaggcgaagagaatggtggaatgcggacatgatgtggtgattttgcttgactcgattacccgtctggcacgtgcgtataatacggtgtcgccggcttcgggtaaggtgttgtccggcggtgtggatgccaatgcgttgcataagccgaagcgtttcttcggtgctgcccgcaatattgaaaacggcggttctctgacgattttggctactgctctgactgaaactggctcgaagatggatgacgtgatctttgaagagtttaagggtaccggtaatatggagttgcagcttgaccgtaagttggcgaacaagcgtatctatccggctgtggatattacggcttcgagcacacgccgcgaagatttgttgttggaggattatgtgttgaacagaatctggatcttgcgcaattatctgacggatatgaattcggtggaggcgatgcagtttgtgaaagaccgcttggagaagactcagtcgaacgaggaatttttgatttcgatgaacgacaaataagtttgtttacgttatatatatggtataagggcagccgttgtggctgctttttttatttataatatgtataaatagcagattgttttgaaaattgtcatctccagattgcaatttacagataagttttttatctttgcattgcaaaagttgatatatgaacagtttgattacaacacacacgactcttttgaaagagcgaaccttcgccatccgacgcggattgctggatgcgattgaccgcggtagccggttgattgccgtgaagggaagccgtggtgtgggtaagacaagttttctgttggattatggcagggagtttcatgcgggagagaagtcttgtctgtatgtgaatatcaataatctgtttattgtgtatgatggccttttccattttgtggagtatttttataagttgggcggaaaggtgctgttgttggatcaggtgcataagtatccggagtgggacagggagttgagggcgtgttatgatgctttccctgatttgcaaattgtctttacggcttcgtctattgtacgtgtcaagtcgaatccttatctgaaaggggtggtggatatgtataatttgagtgggctttcttttcgggagtttctggaactggaaaccggtaaggagtttccggtctgctcttttcaggaaattgtggaaaatcatgaggaaattgtagagcgtgtgctgaaggaggtgcgtcctttggcttattttcataattacctggagtatggatattatccgatttatctggaacagaagtcgcatatcgattatttgttgaaaaatatcaatctaacgctggaatttgatattccctatgcaagtcagattgagttgaaatatctggtgaagttgaagcagctgttgtatgtggcagctgttgataaatcgtgcagcgtgaatgtcagcaagctgagcgcagcaatcggcgtttcgagggctacggtgatgaattatctgaactatatgaagaatgcccggctgttgacgttgctgtatgaggagggaaatgatgacgaatgtggcaaaaaaccgaagaagatgtatgtgcataatccgaatctgttgaatgccgtgtgtctggatgaggtgaatccggctgtgttgaataagtcgttctttttgagtcaggtgtgtcctgtggctcgtatcaattatacggaacaggcagatttcctggtggacgggaactatcgtgtggctgtgtgtcaggaggggaaaggaaagaaatgggatgcttctgtcgtggtgatggaggatatgattgagcggggaaagggtcatgtgattccgctctggctggccgggtttacgtattgatgtgtttgtattgagagaatgttatataaatattgaattagtttaatttgaaaaagatggctaaagagaaaaaatttattacttgtgatggtaatgccgctgctgctcatatcgcgtatatgttcagcgaggtatcttgcatctacccgattaccccgtcttcaccgatggctgaatacgtggacgaatgggctgctaaaggaagaaagaacatgttcggtgaaactgttcgcttggtggaaatgcaatcagaagccggtgctgccggtgctgtacacggatctttgcaggccggtgctttgactactacctatactgcatcacagggtctgttgttgatgattcctaacatgtataaaattgccggtgagttgttgccttgcgttttccacgtgagtgcacgtgcattggctgctcatgctttgaatattttcggtgaccatgcagatatttattctgcccgtcagaccggtttcgctatgttggcttccggatctgtacaggaggtaatggatttgtctgctgtttctcacctgactgctattaagtctcgtatcccgtttgtgaatttcttcgacggtttccgtacttctcacgaaattcagaaaatcgaggagttgcagatggaggatgtgaagggattggtggatatggatgctttgcaggctttccgtaaccgtgccttgacttctgaagctcctgttactcgcggtactgctcagaacccggatatctatttccagggtcgtgaggcttctaacaagtttatggatgctgtacctgatatcgtggctgactatatggctaaaatcagcgaaatcaccggtcgtaactatcgtccgttcgattattacggtgttgctgatgctgaaaatatcattatcgctatgggttctgttactgaaaccatccgcgaggtgattgattatgaaaatgctaacggcaagaaggtgggtatgattgctgttcacttgtatcgtccgttctctgctaaatattttatggaggctgtgccggctactgtgaaacgcatcactgtgcttgaccgtacgaaagaaccgggtgctaacggcgatccattgtatttggatgtgaaggatgtattctacggtaaggagaatgctccgattatcgttggcggacgctatggtatgggttctaaggatgttactcctgctcagattattgccgtttataaaaatatggaacgtaacgaaccgaaaaaccagtttactctgggtatcgtagatgacgttactttccgctctctgcctgctgaagaggatgtgaaaatgactcctgcaggaacttatgaggctaagttctatggtttgggatctgacggtactgtgggtgccaacaagaactctatcaagattatcggtggagctactgataaatattgtcaggcttatttcgcttacgactctaagaagtctggcggttttaccgcttcgcacttgcgtttcggtgatgctcctatccgttctacttatttgattactactcctgacttcgtggcttgtcatgtgccggcttatatccacatgtatgatgtgttgaaaggtctgcagaagggtggttcgttcttgttgaactctatctgggatgaggaagagactaagaaacacctgcctaaccacatgaagcgttatttggctgaaaacgaaatcaatttctatattatcaacggtactaagatcggtcaggaactgggtctgggcaaccgtaccaatactatcatgcagagtgctttcttcaaaatcacaaatgtaattccttacgaattggctgtgaaagagatgaaggctgctatcgacaagtcatacggcaagaagggtgaggctgtggtgaatatgaactatgctgctgtggatgcaggtggtaaagagggtaacctggtgaaagtgactgttccggctgaatggaaaaatctgcctgaggatgaagtgaaacatgacgaaaaccgcccggctttcatccgtaatatcgtggacgtgatgaatgctcagaaaggtgacagcctgcctgtaagcgctttcaacggttttgaagacggtactttcccaagcggaactgctaaatatgaaaaacgtggtatcgctgtgaatgttccggaatggcaagttgaaaactgtatccagtgtaaccaatgtgcttatgtttgtcctcatgctgctatccgtccgttcttgatgagcgacgaggaattggctgctgctcctgccggtactcaggctaaaccggctatcggtaaggaattggccggatataaattcagaatgcaggtgtctccgcttgactgtaccggttgcggtaactgtgctgatgtttgtcctgccaagactaaggctttggttatgaaaccgctggaatctcaggaagctgaaatcgagcgttggaatcatatggaccgcaaagtgggatataagagagtggttgagcctaataatgtgaagaattctcagtttgttcagccgttgttcgagttctcaggagcttgtgccggttgtggtgaaactccgtatatcaagttgatttctcagttgttcggcgagcgtatgatggtggctaatgctacaggttgttcttcaatctatggtggttctgctccttctactccgtattgtacaaattacgaaagcggacgcggaccggcttgggctaactctctgttcgaggataacgctgagttcggtttcggtatggctgaaggtgctaaccgtctgcgtgaaagagctaagagattgttggaagagaatatgaatattttctctgctgaaactcaggctgctatcaatgcttggatggaagcttatagcgatggagacaagactttggctgtgagcgacgctatgtcggctgctctggagaaggaatctgctccggtggctaaggaaatcctgactttgaagaattatttcactaagaagtctcagtggatctttggtggtgacggttgggcttatgatatcggttacggcggtgttgaccatgtgttggctagcggacacgatgtgaatatcttggttgtggatactgaggtttattctaacaccggcggtcagtcatctaaatctactcctgcaggtgctgttgccaagtttgctgccagcggtaaacgtatcagaaagaaagacctgggtatgatggctatgtcttacggatatgtatatgtagctcaggtggcaatgggtgcaaaccaggctcaatatatgaaggcgttgaaagaggctgaggcttatcctggaccttctttgattatcgcttatgctccgtgtatcaaccatggtttgaaagccagcatgggtaaatcacagcaggaagagaagaaggctgttgagtgcggatactggcagttgtaccgttacaacccaatgctcgaagctgaaggcaagaatccgttccagttggattctaaagaaccggattactctaaattccgtgagttcttgatgggtgaagttcgtttcaactcgttggttaaggctgctcctgctgatgcagaacgtctgttcgaagagactgagaacgatgctaaatggaagttgaacggatacaaacgtctggctgccatggaatatggtaaataataagttaccttgaatatatgaaaaaagctgtccgtgagggcagctttttttatatggtgtttattggtgagatgcaagccggtaaacttcttctttgatggctgcagcccattctgtcggttttttgcttttgtcgaggcattgccaggggatgggacgaccgatgtggatggtgaagtgttgccctttctttttgaaggtttcgtccgggagacaaagcatttccagattgacattcaggtggatggctttgcgaaagttggccaggttgtagaaaaagtggctgttctgtccggagatgaagatggggacgatgtcgcgatggtgttgttgggccttggcgacaaagcttttttgccaatccaggtctttgatgactcctttggtcttgcggcttaccattcctgccgggaacatgatcatctgacagtcggatgcgtaggcttcttcgatggcggtgacggcttctttggccaagcctccgtgtttgttgatggggaggaagatgttgttcagatttttcaagttgagcaggatgtcgttgaccggaaatttcagtttcggatagtgtttgcccaagaaagatatcagtatcactccgtcgggaccgcccagcgggtggttggagacaaagatgtagcgtccatcaggtgagggaaggttttctttgcctatgatgtcgtaggatatttgcagatattccatcatgccatcggcaaagtcgagacctttgcggtcgccatatcgctcaataaattcgttgatgccgtcctgatggatgaggcgttttaggaatgagtatacaaatccgggaatcatgcgagcaacacgcggattcttgcttttaaagacttgttcgatgtatatcggtcggacccgatcattattttccatgtttgttgttttttatgattgaacaaagatacgaaagttctgcgatttcaaagaagtttttgaaagggagggaaacctttcgcagtgtgttgcgttataagatgagtgagatttataaaaacaacacaaagttaaacttaaaagggatacgatgaaacagagatttctattgacgggagcaatggcgatagccttgtccgcctttctgtttggatgtaattctatgaaacatttacagaaagaagtgattgaatcggccgtgaccggcagcgttaatccgacgcagctggaggctttggacgatgtggtgaattttgattatacgatcaattttgaaccgcgtcagttagacaaaaagactgtattgaaaataactccgaaatttcaatacggaagtaacatggagcggttgcagccgattttcctgcaaggggaaaaggtgaaaggctcgaagtatccggttgtgtcgttcactaagccgagcagttttacgaagaagctgtcttttaaattcaaggagggcatgcagaacggtgtgctgtgggccgacattgaggctatccggggtggaaagtcttttatgatgagtccggtggtgttgaataaaaacggtattcaagtgtggaaacagcatacttttatgttggatggcgtgaagtatgttccggtgatgacagaggattttgttgaagatgtgccggcttctgaagtcggagtggtgagcggatatgtgatgtttccgttgggaaaagctactatttcgcaggcagaacagaaatcggctgtgatgacgcaagctgcgaaagcactggagaaggtgatggccgataagaatgccaagattaccaatatgtttgtttatgtgtccaattctccggaaggagcagaacgcttgaacagaaatctgggcgtgcagcgttttaatgcagccaaggctttttttgaaaaagatctgaaactggccggaacaccgatggtgaaggatccatcgtttgttgtgtcgcagacggaaactgaaaattgggaaggtctgtatctgttgcttgaaaattcgactattgccaaccgtcagcagatggtgcgtgagttgaaggctgcgaacgctgagaaacgttcggctattctggaggcttatattgcgaaggtgcctgagttgaagaaggtgattttgccggctttgcgtcgtgctgatttcttcgttttctatacagagccgacaatggtggaagaggatgtggagttgacttgttatgctccgcaattgaatgaacagactccggctgtggtggctcataagaattggcagttgctgaatgacctggctgtgattgcgattcagaataaggagtatcacaaggctgagaagttgttggaagcggctttgaccttgcagcagaatgagacagtgagcaacaatatgggcgtggtatatgccaataccggaaataaaggcaaggctgccgagatgtttaatcgcgcaaagatccgtaaggaagcacgctataatatcgggctggtattgctggagaacgatgagtatggcaaggcgattccttatctgaaggatatgccggatattcatttggcttatgcacagttgatgaacaatgacaaccgggctgcattggaaactttccgtaagattaaactgaacagtgcgatggagtattatatgatggctgttgcggccgcccggacgaaggatatgaaggatatggtgtacgctttggagaaagctgtaaagttgcagccggacctgaaagagtgggctgcaacagatatcgctttttatccttataagggagaggctgtttttatgagaattgtaaagtaagcggcttacaagtaggtcacttctttgaaagcatagaggcgttcgcatcccgcttcatccaggagacgtaattgaccatattcgtccatgccggcggtggaagcccggaaacgtccacgggcatcttcccattggtggatgcctgtgccacgataaaggtggtggaggaattctttttccagagtcgcgtagtcgtggatagcagcatagcgtgcgtcgatgcaggagagtaattcttcgagtgcctgttgcaggggaaggggatggccgatgagttgaaataatgaaatcggattgggagcatccgacaggaaatgctcctgattgacattgaggccgactccgcagatggagttgccgatatacatgccggtaatcttgtgttctatcaagatgccggctatttttttgttgccgacatagatgtcgttgggccatttgacagatacattgtcggtgtagcggctgacaaagtcgaagcagccgagggctatcaccatggaaacggcaaattgccgggaggcttctaggcgtttaggtttgaggacgactgtcatggaaatgttgctgtcgggtgcactttcccaagagttgcctacttgtccgcggccctgtgtctggcgccaggtgaggatgaccatgcggtctgtcagttggttggaaggcatctctgctgcgcaggtgttggtagatgccatctcttcgtattccaggatattgaaattgcctattttatatgttttcatggctgttgtattgcatcgtttgtattttatatgcgccaaaggtatggtaattttggcatcttttcaaatgaaaatatgtatgttgaatgagccgaagttacgctgaaaagcgtaactttgcgtttattttaactattagatatgaaaaagaagtttttgtggcagacaagaaaacaaatcttgtctttgttgttgtgtgcaggatctatgatatctgccggatgtgataatcataatagccagaatccgaaaatttatttctgcaatcaggaggaggggagagatattgtttctgtgcgggataattattgcaataatttgagtaaaaaagatttgtattaccgcttgcatgagaagggcatggaatcaactgtggataattatattgcagtggcgtgtgagtctgtaagtgaatggagtgaagaggaaatttcctggtggaaaaaatgttttgaccgggtgttcaaggttgctgattcgtgcgggtattcgctaccgttgccgggagaaatcaaagtggtgaattctgcgatggaggaggaaggtggggcagccggatatactcggggtacgacaatatttctgaacagcaaagtcatgatgggaagagaggaaaaaggagtagaactggttgctcatgagttgtttcatgtactgacacgcaattgtcctgacttccggaaagcgatgtataaacaggtgggctttcatgtattggatcgggaaattgtattaccggatacactgcggaagattcaattgtcgaatccggatgtgaatctgcatgacaattatattaaattgcacaaaggtttggagggagataaacctcatgctttgttcctctattttggcaaaccgtatgcaggaggtgctttctttaattactttgctatcggattgttgccattggatgagaatatgaatcctgtaatgcatgaagacgggactccgattatccgttcgttatatgattatgctgatttctttgaacaggtgggaagaaatacggattatttgcttgatgtagaggaaattttggctgaaaattttgtgttggctttgtttggtgaggaggaaaaaatggtttcaccggaggtgattgccaaggtacgtggggtgatgaaaaatggtcactggaagtaggatttggttgtttttttgctatctttgcatacacttcaaattattagtttttttatggcagagaattattcggaagattcgattaggacgctggattggcaagagcatatccgcttgcgtcccggtatgtatatcgggaagttgggggatggttcggcggctgatgacggtatatatattttggtgaaggaggtggttgacaattccattgatgagtttgcgatgggggcgggtacggaaatccggattactgtggaggaccggaaggtgacggtgcgtgattttggacgtggaatcccattgggtaaactggtggatgcttcatcgaagatgaataccggagcgaagtatgattcggaggcctttaagaaggcggtgggattgaatggtgtgggtatcaaggctgtgaatgctctgtctgaaatgttcgagattcagtcgttccgtgacgggaagacaaaatatgtccgttattcaagggctaaaattgtggaggaacgcaagattgagaattctgaccagcctgacggaacgcaggtggtgtttttggccgataaggagattttcggaaactaccactttataggagattatctggaggccatggtaaagaattatgtctttttgaataccggtctgacgattgtgttcaacggacataagtatttttcgaagcatggtttatatgatcttttgaccgaaaatatgaatggtgacggactttatccgattatccatttgaagggggaggatatcgaaattgccatgactcatggaaggcagtatggagaggagtattattcgtttgtgaacgggcagcatactacgcagggcggtactcatttggcagctttccgggaggcgttgagcaagactatccgggatttttacaagaaagattttgatgtgtcggatatcaggacctctattatcggcgcaatcagtatcaaggtgcaggagccggtgttcgagtcgcagaccaagacgaagctgggctcgaaagatatgggaccggacggaccgacggtgcgtaattttgtgatggattttattacgcgggaactggataattatttgcaccggaatccggatacggcagagttgctgttgaagaagattgtcgaaacagagcgggagagaaaagcgatggccggcgtgcagaagattgcccgcgaacgtgccaagcaggtgagcttgaataataagaaattgcgtgattgcagggtgcatttcaattcgaaccatgagcagaaaaatgagtcgtctatttttattacggagggtgactcagcaagcggttctatcactaaatcgcgtaatgtgaatacgcaggcagtgttcagtttgcgtggtaagccgttgaattcctatggtttgacgaagaaggtggtgtatgagaacgaggagttcaatttgctgcaggcagctttgaatattgaaaacggtttggaagatttgcgctataataatgtgattatcgctactgatgccgatgtggacggtatgcatatccgattgttgttgctgactttctttttgcagtttttcccggatctggtgcgtagagggcatgtttatattttgcagactcctctgttcagggtgcgaaataaaaaagagacccgctattgttattcggatgcagaacgtgagaatgctatccggaatttaggtccgaagccggagattacgcgctttaaaggtctgggtgagatttcgccttccgagtttgtgcattttatcggtaaggatatccggttggagccggtgcgtatctcaaagggggattccattagtgaggtgttgagttattatatgggtaaaaatactcctgaaagacaggattttatcattgataatctgtatatagaaaaagacgaattgcggtaatttaaaatagatatttatgggtgaggatacactagaggacgtgggtagcatccgttctatccagcatttggacggtatgtatcaaaagtggtttctggattatgcatcgtatgtaatcttggagcgtgctgtgccgtatgtggatgacgggctgaagccggtgcaaagacgtattttgcattcgatgcgggagatggatgacgggcgttacaacaaggtggctaatattatcggaaatacgatgaagtaccatccgcatggtgacgcttcgatcggtgatgctttggtgcagttggggcagaaggatttgttggtggattgccagggaaactggggtaatatcttgacgggagatggggctgctgctcctcgttacattgaagcgcggttgtcaaagtttgcattggaggtggtgtttaacccgaaaacaacccagtggaagcagtcttatgatgggcgtaaccgagagccggtgacgttgcctgtaaagtttccgctgttgctggcacagggggtagaaggaattgccgttggtctggcatcgaagattttgccgcataatttcaatgaattgatagatgcttgtatcgctcatttgaagcatgaggagtttgtgctttatccggatttcccgaccggagggatgatcgatgtgtcgaaatacagtgacggtatgcggggaggaaatgtgaaaatccgggccaagattgagaaagacagtagcaatcgggtgttgcgtattacggaaataccgtttggacgtacgacacagtcgttgattgacagtattatcaaggccaatgataagggaaaaatcaaaatcaagaagattgatgataatacagcgcaaaatgttgagattttgatacaattggcagcaggagtatcatcggataagacgattgatgccttgtatgcgtttacagattgtgagttgtctatttctccgaactcttgtgtgattgatcatgagaaaccgtgttttatgccggtgtcggatatcttgagaaagtcggccgatgatacggtggcgttgttgaagctggaattggaaattcggttgaaggaattgttggaggatctgcattttgtgtcgttggagcggatatttattgaggagcggatatacaaggacaaggagtttgaggagggggaaacgctggagcttgtcattgctcatgtccacaagcgtctacaaccttttttaccgaaattgtatcgggaggtgacagatgaggatgtgaagcgtttgctggagataaagatgaagcgtatactgaaattcagttcggaggaagcagaccgttatatccaggctcttgagggtgaaattgcagaggtgaaaaataatattgagcatataattccttattctattgcttattacgagcggattaaggaaaagtatggtaagggaagggaacgtaagacagaaatacgtaattttgagaatatagaggctgcgaaggtggtgatagccaatgaaaagttgtatattaaccgggaagagggatttatcggtacggccttgaagaaagatgagtttatctgtgagtgttcggatatagatgaggtaattgtctttaaaaaggacggtacttattatgtgacgaaggtggcagataagatttttgtcgggaaggatgtattgcatgtcaatgtattcaagaaaaatgaccggcgaacgatatataatgtagcatatagagatggacggtatggagtgacgtatgtgaaacgttttaatgtgaccggagtgacgagggataaggaatataatctgacaaaggggacgtccggttcgcgtgtactttatttttctgcaaattccaatggagaagcggaaattatcaaagtatgtctgaagccgaagcctgctcttaagaaattggttttcgaatatgattttgccgacttggcaattaaaggaagggattcgcaggggaatattctttcgaaaaacgatgtgcataaaatcagtgtggtgcaaaagggtgtatcaaccttagggggacggaagatttggctggatgaggatgtgttgcgcttgaatacggataaccggggtaaatttttgggagaattccagggtgaggagcgtattttgattgtgaataaaaacggtacgtattatacctctgattttgatttgagtaatcattatgaagagggatatcagatatttgagaagtttgaacctgaaaaggtgtgggctgccgtattttttgattccgaacaaaattattattacttgaagcgtttccgttttgaggaatctgcaaaattaaatagttttatcggtgaggcgaaggattcgtatttggtgtgtctgagtgatgagcagcatccgcgttttgaagtggtatttggcggacgctatgagtcgcgaccggccgaggtgattgttgcagaagattttattgccgagaagtcgtttaaggcacgaggcaagcgtgtgactacatttgaggtaaaggagattcgagaaatcgaacctctggagcaggaatccgaagaggttgaggaggtggagtttgaaattacaaatcccgaagaagtggcgggagagacacagatgactttggactttactcaggaagaggaatgaaatattttttagtgggatatatggcttgcggtaagagccggagaggacgtttgatggctgaaagtctgggaatccgttttattgatctggatgattatatcgtgaggcgtgagatgaggacaattccgcaaatttttgctgttgacggggaggatgttttccggaggttggaacaacgttatttgcatgaagtgtgtgagttgtatggggattttgtaatggcgacaggggggggaaccccttgtttttttgataatatggaatatatgaaccgacaaggtaaaaccatctttttgaatacggatgtagatattattgtcgagcgtttgttgaaagcaaaatttcgtcgtccgctaataagtaggctgaataataatgaagtgcatgcatatgttgaaaaacatttgcaagagcggatgccattttatttgcaggcacaggagatagaaaatagctatttatcttgatgttatgggtgaacatataacttttcgaaggaatgaaagtttgaaggtgatacaaccctattggcggggaaatcctgttgtgaaagggcgttttgtcaatcgtcagcatcgggtgaaacatggtgtgggcaatgtgatgaagtggcgtttttctcctaatccacaacgaaaagagaagcgtcaggaaaattggaatccacatttaataccggtacatagtctggagcatttgagcggtgattttctggtgtggctggggcataattctttttacatgcagttagcgggtaggaggattatgtttgatccagtttttggaaatataccttttgtcaaacggaaaagtaaatttcctgcagacccggctgtgtttcaacatatcgattatttactggtcagtcatgaccatttcgatcatttggacaaaccgagtgtaatgagactatttaagggaaatcctcagatgaaggtgttttgtggttttggtgtgggaaagttgattcaggggtggtgcccggggattgaggttgtggaggccggatggtatcaacaattggatgacggacaattgaaaatcacttttttacctgcccagcactggggtaaacgttcgttgaatgacggaggacagcgtttgtggggagcttttatgttgcagggggatggtttgtcggtgtattatggcggagatacgggttattcgaatcattttgtagagataccggaattgtttggagaaccggattatgctttgttagggataggggcttataagcctcggtggtttatgcagccgaatcatatttcaccctatgatacattgacggcttcggaggaaatgcgggcaagagtgacaatccccatgcattatggaacatttgatttgtcggatgagccgctgagtgatccgccttctgtttttgctgcagaggccaagaaacgcggtattcgggtggagataccggttttaggcgaggtggtaaaattatctaagtaataatatattttatggatatgacaatgtgtaattcagagcaaaaaacaggggctttagagacgagagatgcccttgaaactattttttcgcgcaagagtgtcagaaaatttttgcctcagccggtggaaaaagaaaagttagaattgttgttaaaggcaggtatggctgctcctagcggaaaagatgtgcgtccctgggaattgattgtggtggatgaccgggctgctttagatggaatggcagaggcattgccttatgcaaagatgttgaaagatgctacaatggctatagctgtatgtggagatacgaccaaatctgcttattggtatgtggattgctctgctatggctcagaatatactgttggctgcagaggctcttgatttgggggctgtatggacagcagcctatccatatcaggacaggatggatgttgtgagaaaatatatcggacttccagagaacgtagaaacattatgtgttattccaataggttatcctgcaaaaccttatacaccgagggataaatgggatgagacaaaggttcactataataaatggtgatatgtgctacaaaaaaagagcttgaatttttcaagctcttttttgttgttcaaccaggactcgaacctggacaaacaggaccagaatctgttgtgctgccattacaccattgaacagaataaagcgttattgttattttgttgttcaaccaggactcgaacctggacaaacaggaccagaatctgttgtgctgccattacaccattgaacaatatggtcgctttattttgacggcacaaaagtagctatttattttgtatatccaatagaaaagcgaaactttttttagaaatatgcataaaaaaaccggcgaattgcgccggctttttatgtgatatctagaattgattattttgtagcattttccaaacgtttcatcatcatgaaaatgaacaatgctgaaatcagacataatacaataaggattgaccataatgcccataattccatgtgtccccacaacataccgatgacagatactaaatagttgccgatagctgtagcaccaaaccaaagacccatcattaatcctttgtatttgggaggtgcaactttggaaacaaaagagattcccattggtgataagaacaattcagcaaaagtcaatactaggtaagtgttaatcaatacagccggagaaactagcagattgctgtcaacgacagtcgctgtatctgcattcggcatgggaagtcccattgaacacatagccattacagcgaatcctaatgccgcaatcaacattccgataccaatcttgcgaggtgctgatggttctttgcctttttttgccaatgctccgaatacagctaaagatactggagttaaggctactacaaagaatggattgaactgctggaacatctgcggaagaacttcaatagaagaatctggttctaaggacatgtatctatatactaatataccaatagaaagagttcctacaatagcagaaattgcttttgtcttgccggctttagattggaataaggagaataagctgtatactaatgcaataacaaatacaaggttgataacatcgaagctcatacccatgataccttctgcggttctggctgtgtagtctcgagcaaagaatgttagtgtcaatccattttggtggaatgccatccagaagaaaattacaacggcaaaaacaagaactagggctgttatgcgtgatttggtttgttcgggagttagttcaatgatgttttctttatggccgctagctgcagcttgtttggtgttaacatctgcatgtttaaaggtttttttgaatacctgataaatcagcatggatataaccagtgagaagcatgctacagagaaaccatagtggtatgaaagcgaaagttcattgatatattgatttgcaaatgtttcgaggtcaccattgaatggagctgtctgtgaggatgcaaaatttgtcaatgtttctaatgatttggctgccatgtctgtaccttttgccaaatattcgtggcaaagtgctggaatatcaccctggtatttaaaaccagcctgtcccatgaaatgttctgtgattttggatgcggccgttggtgcaaataatgagccaacattgattgccatatagaataagctgaatgctgtgtcgcgtttgtcagagtatttcggatcgtcatataagttaccaaccataacttggaggttacctttgaatagacctgttccaagagcaatcaagaaaagtgctccaaacatagtcccgataccgaaagcatcattgccactaggtatggcaaggaatgtataaccggcaaacatgacaacgattcctgctgtcaccattttgccatagccgaacttatcggcaagaatacctcctaatacgggtaagaaatataccaatgccaggaatccggcaaagatattggaagtggctattgaactaaagccgaattttgcctgcaagaacagtgtaaagattgcaagcatcgtgtagtacccgaagcgctcacccgtatttgcaagcgccagagcatacagtcctttgggttgattttgaaacataattttgatttttagtatataacaattaatcaaaaaatatccgggtatagatacacccggatatttttgagtttatcgtgtcttttattttgtgactttctccaaccattttaccatacccagcattacgcccatagaaacaagacatactgcgaggaatacagtccagcactgccagataggccatgcattgtacatgaggggaccaatccataataacaagttaccgatagctgttgctgctaaccataaaccttgacacagaccaagcatgctcttgggagcaacttttgatacgaatgataaaccaagcggagaaataaacaattctgctacagttaagaagaaataggttgcaatcagaacccaccaatgtgccttgtttgccatttgttctgcaataggcaaactcttgaatgcttctgcagatggataacctttcaataatgagaatacagcgaggaacaagaatgccaagcctgcaatgaacataccaattgcaatcttgcgaggtgtgctgatttctttaccacgtcttgcaagtgaaccaaagatggccatgatgatcggagtcaagaatattacgaagaatgggttgatagcctgccatacttcaggcgcaactgctgaagagtcaacaaagtcgcgagcgaagaaagacaatgacataccattctggtggaatgagaaccagaagaagattacgatacccaatacagcaaacaatgcatacatacgctgtttgatttcttttgccattgcagctttttcttctgctgtgtagtttacgctctgtgctgcaactttctttgcaggggttgggaatgttttctgtgatgcaaagaagattaccaaagagatgagcattgcaacaactgatgcaatgaatgaatagtgaataccttcattgaagaattgcaggtattgactacaagatgcagccaagtcgttgatgttgccaccagcagcgcccataagttctttcaaattggcaagtgcttctggagccattgctgcagcattttcaatgtagttgtggcaaagagcaggaagctgagcattgtatgccaagccatttgctcctaaccaccattcgcgcaataaaggagcaacgaacggagcaatcaaaccaccaatgttgatgaatacatagaaaatctggaatcctgagtcacgtttgtctttcgctattttgagggcttcaggaccttttttagcagcttcagcctcaaagttatcatacatctgacctacgattgcttgtaagttacctttgaataaaccattaccaaaagcaatcataaataaggcaacgcatgtgagagttaacaaccatgtggtgttctctgctgtggcaagaatagggatggagaggataatgtaacctgctgccatgatgaccaaacctgtcttgatggtgcctttgtaattttgtgtgcggtctgcaataagacctccaatgaggcttaaaatgtaaataccggcataaaagaatgagtagatagtgccgctggcagcttcactcagaccaaatttagaacataggaacaataccaacacggcattcatgatatagtagccgaaacgttctcccatgttactcagagccgctgtaagcaggcccttaggatgatttttaaacatagattaattatttaagttaatattgacttcacaacggagacaaatgtagctaaaattccttacttttagatgttgaaaacgattgagttcttgttatggaaaagttaaataaaatttatcgaactgcagatgtccctcgaatggatgcttatactattgatagtgagaatataagttcgtgggaattaatggaaagagctgctcggatttgggctgattttttttctgaaaatatgaaaaataaagtaccggttatagtaattgccggcagagataataatggaggtgatggttatgctattgctagaatgttgtatttgaagggtgtagatatagaagttgtttgcctgccatctgagcatggttttagtaaggattgtgagaaaaatcgtaaattatgggaaaatataggaggaaatacgacttttgttgaatctccggagcagtggaagccatgtcgggaggctgtgttgatagatgctattttcggctcaggattgaatcgtccggtaaaaggtgtgattgcggagatgattcatcaaatgaataaattgccgaatgttgtttatgctgttgatataccttcgggattgatgggggaggataattcgcttaatgattcgacttctattgttcgagctgattatacttatacctttcaattccctaagttgtcttttttattgccagctaacgcttcgtatatcggggagtggtttgttttgaatatagatttgaaaatagacgtcgttgagccgttaggagagtgtacttcattggaaactgtacagaaattattgccttctcccggaaaatttgaccataaaggggttaatggacgaggtctgcttgttgccggtagttatggtatggctggtgctgcagtgcttgcctcaagtggagcgttacatgccggtattggagtgttgcattgtcatgtgccggcggattgtgtgaatgtgttgcagattgcggttcctgaagcagtgttggatattgatacttctaggaagcattgtgctcatgtttcagacttggaaatatataatgctgtagctattggtccgggattaggtaagcatgaggaaaccgtaaatgttgttagaaaattaatgcagacgtgggatggcccgatgataatagatgcggatggtttgaatattattgcagagcatcctgagttattgacatatttgcatgagcgatgcttattgactcctcatgtaaaagaatttgagagattagtaggaaaatgtgcaaatgattttgttagattaaataaattagtcatttttgcaaaacaatataaggtgtaccttatattaaaaggtgcttattctgtggtggcaactcctgaaggaaaaattttctttaatatgagtggtaatccgggtatggccaaagggggaagtggggatgtattgacaggaatattgcttgctttagctgccaatggcttgaatttgttggatgttgcgaggattggtgcatttgtacatggattggctgcggatattttggtagaagaatatggatttcggggtattacttctggaatgttggcacaggagttagggcatgcatggaaaagaatagaaaaaaagataatagataagatatgaaaagaatactaattctgtttgtggtaagtgtacttgtattgcaagtttttgcacagaaaaagagagagatttcaacggctgtaaatgtaaattattgcttgcctaaagttgtgtataaacttgaagtgataatggattgtatacagtatataccagggccatattggaagtatgcggagaaagaattgagccttactcctaaagttatagaagccaaagaacgttggaaaattgcagatattaaagtgtctcctcaatatgtccctgatgaaaaagcaatgtattctgttgcagcatctgcagattattggcctgtggctttgacgttaagcgcagaaggttttttggctggaatcgctggtggtaaaggagaagtggttgggaattatagtgcattggaatatcataacaatgaaataaaggatattgaagttatcgacattacgaagttgaacacctataatcatttgaaggaagttttggatacaaattataccttccaagaagtagatggcgagatgaaaaagatttgggatccaatcattcgttatgctagtaaaaccgaacttgataatgtcaaagaggctgttagtgaaattttccgtattcgttcagaacgagttcgtttattgaatgcagataataatgtgccagatggtaagtcattggagattattttaaaagaatatgaccgtatagaagctaattacttgagcttgtttatgggaaagaagattaccaatcgggttaaaaaggtggtatattgtactcctttgaaggctgatgaacctactctggcttttcgttttgcagaaaatgagggaattacggattctaaaaatgtttctgcattggcatattttctacaagtgtctgatgtaactgttccctcttcaaagtctattgatggggaagcagatgttgccggaatcttttatagagttcctgcgatgggtaaattgcagttattgtgtggtaaagatattttgatgaagatggaaaccattgtcccacaattgggcgagataaagcgttttccattggacatcattagtaatgagggactgtctttagagttttatccgcaatttggttctctgaagagtgtaaaaagaagtaaatagtagtctttaaatatgtttgaagcatcttggtggaataatttgtatacgcgatttttaagttggcgtgtacgatatatcaaggaaaggaattttattataattcttagtttgctggtgggtattgtcactggtttagcaggagtatttttgaaaaattccgttcattttacacaccaattttttacagagcgtcttcagattgatagtggtagccttttgttttttgtatatccttttattggtatattactgacctctctttttgtaaagtattttgttcgagaggatattagtcatggagtgacaaaagtgctatatgctatgtcgcggcaaaatagtatgataaagtcgcacaataattactcatccatgattgccagtacaatcacaattggctttggagggtcggtaggaactgaagcaacgattgttttgacaggagcatctataggttcaaatttggcccgtttcttcagaatgaactacaaagtgatgaccttgatgattggttgtggggctgcgggagcaattgccggcatttttaaagctccgattgccggcattgtatttacgatggaagttttgatgcttgatctaacgatgacatttcttattcctttgatgatttctgcgatttcttcgtacgttattgtttattttttgatgggagagggtgtcgttttggaatttgcagtgcaatcccattttgccttggccaatgtgccttattatatattattgggtattatgtgtgggtttgtttctgtgtattttatacgtatgaatttgcgtatagagaaatggataacaggatttcaaaataattttaagcgtattcttatcggaggtgcattattgggcttgttgatttatgtctttcccccattatatggtgagggctatacatctttggctgcacttttgaataataatggtgatgctttattgaacaatacttatttttttgattttcgtgcccattggtatgtcgtcgttttttatgtggtagctttaattttcataaaagtggtggcgactgctttgacgaatggtagtggtggtgttggtggagtttttgctcctagtttgtttactggtggtgttactggttatttgattgcaacgttgattaatatgaccggtatcgtacatgtgccggtgagttattttgtattggctggaatggcaggagtgatgtctggtgtgatgaattctcctctgactgccatgttcttgattgcagagattactggaggatatagtttattggtgccgttgatgattacttcggtgacagctcatcttacagggcgggggatggaaccttattctatttatgcacgacgtttggcaatgaagggtgatttgataacccataataaagataaggctgttctaactctgatgaaattaaataaagtaatcgagacggatttacagacagtaccgattaatgctactttgggagatttggtcaagagagtttcacgttccagccgtaatatttttccggtggtgaatgaagacgatgccttattagggattgtgttgttggatgatatccgcaaagtgatgtttaatcaggatttatatgacaaaacttttgtccgtgattttatgacaacgccaccaaccattgtggatgtaactgattccatggatttggtaatgaagaaatttgaagatacgaaagcttggaacttacctgttatcgaggatggacgttatatagggtttgtttctaaggcaaagatatttaatacctatcgtagagttttacagcatttctcggatgaataaagttttaagaagacggtatgacgatggatgtaaacaataatgaaaaattaggtattcggtctggtttaatttctatcatactgaaccttttactttttgctttaaaatactatgccggtattgtttcggcctctgtagctttggtagcagatgcctggcatactctttctgactcattgacctccattgtgctgattgttggtattaaattatcagcgcaaaaaccggataaggaacatccgtttggacatggacgttgggagcaaatttcagcattagtgatagcgatggttttggtgttggtgggaatagaatttgttcaggatgctgttggtaaactacagcatcgggaaacagcatcttttggttggttggcttatactgtaaccattttatctgttttggtaaaagaggggatggcaagatattcattctatgtggctaagaaaataggtagttcttctgtgaaagcggatggttggcatcataggagtgatgcgctttcgtctatggttgtactagctgggttgtttttaagtaattattgttggtggatcgatggagtattgggaatgatcgtgtcttttatgctattttatgtagcttatggaattatacgcgaagccgttaatattatcttaggcgaagagccttctgacgaaatgatagctcagattgaagaagttgtaagagtacaaatgggggatgatgctcaaccacatcattttcatattcaccattatggaaatcattccgagtttacgatgcatgtcaaagtagatggtgatatgacggttcgggaagcacatgaacgagccactcgtgtagagcgttgtttgaaagctcaaatggatttggatgctacgatacatatagagcctcaatccatgtaacctttatctgtatatttcgttgtagagtggtaaaattatttgtttatcgcttgtttatttcataaaaagtaatatttttgcgggacttttgaggaaacgttaaaaaactatataactatgtattggacactggaacttgcttcaaaattggaagatgcaccatggcctgcatctaaagatgagttaattgactacgctatccgttcaggagcaccaatggaagtgatagaaaatcttcaggatattgaagatgatgaggaaatttttgaaagcatagaagacatttggcctgattatccgagtaaggatgattttttcttcaacgaagacgaatactaaaagaattaagcgaccacaatttctgtggtcgctttttatttagtcaatttcttcatagaagagttgattgtttttgagtgaaatctcgtatttttttcctttagtggttttgaaggatagtgttttgtctgcatatatcaaggtgcaagaactgcctgctttggaaagaattatagctttttgcaaagcattgttgtcccagtagatgtcgacttcaaaatttcctcttgcgcatagacctgtgatatttcctttatgccattcattgggtagtgaggggagcaagtgtataaagcccatatgactttgcatgagcatttcagtaactcctgctgtacctccaaagtttccatctatttgaaatggaggatgtgtatcccatagattatctaaagttccattttttaggagattagagaagagtttataggctcggttaccatcatgcagacgtgcccattgattcaatttccagcccatactccaacctgttgcaccatctccgcgatgattgagcaccacttttgatgcattagctagagttggtgttgtaataggagaaattgtatggccgggatgtaatccaaagagatgatttacatggcgatgttggtcttgggggttgtcaatatcctctgaccattccattaattggccatagcggcctatttggtagggcacgagatttttgagtatttcttcccattggcggcgttctttagcatcaatgcctagtactttgctggcagagatggcatcttctaatatttcacgaataacagcatgtgcaaaagtagctcccttgtcaatggggccatgttctggcgaagtggaaggtgctgcagtatagcttccgtctggacggtgccaaagatagtctgctgcaaattgtgcactacttttaattaggtcataaccgatctcttttaagaagcgtttgtctcgggtgtagtcgtaatattcccaaatgtgcgttgccaaccaaggtccggacatcgggctaaaattccaagacatgtctttgcttgccaatggggtagtaaagccaaatatgtttccagaaatggatgttgtccagcctcgtgttccaaagtatgtctgtgccgttttttctcctggtttgacaagcatccgtataaaatctatcagtggtagcatacattcatttaggtttgttgggcaagccggccaataattcatttgcagattaatgttattatgataatccacacgccatggtccgtctacattattgtgccatataccttgtaagtttgctggtaaattaccagggcgggaactggctatcagtagatatcgtccaaattggtaatatagttcctctaattgaaaatctttttctccttttcggtatctggctaagcgttggttaatggggaggttacagttctcttgtgtcgctgggtttaattgaagatttactcgtttaaataggctgctgtaatctttataatgaatcttgaatagttcttcataatcgagttttattgcctgttgtatccattcttgagttgtctgttctggatttgtgccaacgtatgtctggggatcttgaaaatctggattaaaattgattttgtagtctgtgtctgcagtaatcagaaatacaacttcatctgcattttgtattgtcagtttgccattttcattggatagggaaccgcctttgttgatagcatgaatacgcacaacgaatttcatttgattgttatctaaatgtcctgtatatattagtccatcttttccagaaggcgacattgttccggttgataccggattggctgcataactgaatatcagattttgttttcccggaaggtccgctttaaagcgtactaccattacattgtgaggataagaaatgaagtaatcccgttgatagtggacggcatctttgttgaattgcactgttgctactgctgaatcaagcgagagactgcgtctgtaattgctcatgccgatcacattgagccccgtttctatataaaattctcccatggtggtaaaattaccaaaacggaagggttcttcgccatacgattcataagccacctcactattgaagtttttgcgggtgaggtaggctgccttctgctgattaccttcatcaaaagcttggcggatatctttaagaaggtgtgcagatgatttgtttacattccaataatagcttgctccttttttcgtattgggaccaccgcgccatagcgacttttcgttaaaggtgatacgttcagcttcaatagatccgagaatattggctcccatatttccatttccgataggaagagattttgattcccaactggtatcaggattcctaggggtatcgccggctgatattggttttttatttccttgccataaatctggacgtccattataccagattgcttttcccgataaagtggtaggtgtgtcaaaccaataggagagagcatgggatggtattgtgtcgtttttaccttgggctgaataaattatatgcagtatgataaaagttaataatgatttcttcataatgaatataggatgtactataaatattaagatataaacaaaaggagcgactctctttttgaatcgctcccctaatcattctatagatgtaaaattcacttatccattaatttcatctaagatttcctgaatgcgttcctggcaaccaccgcaacctgttcctgcattagtttcttctccaacttcttctacagttttcaatcctttttctttaattgctttttcaatctcttcgcggcttacgtcaaaacagtggcaaataatttcgctcataatattttcgttttatggttaataatacatctttaattctacggttcaaatatatacgttttattttatagtaagtttataaatccaatcatatatttttatgtagatataaaatagattgatattgttttatttcatactgtcatagaacactttccacaaattgtcttccaatggaggtttagctgtgatagttatcatttcttggcttaccggatgcttgaagctgatggaacgggcatgaagacagattccgccattttcatttgaacggggaaaaccatattttaaatcacctttaataggacagcctattttggctagctgacaacgtatttgatgatggcgacccgtatataatttgacctctaacagataatatctctgcgaactgcctaatagtttatattccagtttagcttctttactgccgctcttgggctgattgtaagcatgtgatttgtttttttcagtatcgcgcaccaaataatgggttaaaatagcatggtcttcttccggaagatttcctacaatagcccaatatatttttgtgatttctttttcatgttcttggaacattttattaagacgggtaagtgccttgcttgtacgcgcaaaaatcacaacaccgcttaccgggcgatccactcggtggggaatgcccaaaaagacatcacctggtttattgtatttctttttgatgtacgcttttacttcttcgcttaaaggagtatcaccggttttgtcagcctgaacaatgtcagaaatttttttattgacagctataatatgattgtcttcgtataatacttctagcataaacctaaaaaaagatattaatattgttctctttcattggggaaatcaccgctttttacatcggcaatgtaatttccgacagcaccggtcatttctgcgaataaattgtgataacggcgtaggaagcggggtgaaaattcttgattgatgcctagcatatcatgaataacaagtacctgaccgtcgacaccaccacctgcaccgatgccgataatagggatacttacctctttagcgacacgtgttgccaatgctgccggcactttttcaatgacgattgcaaagcatccggcttcttctaacaagtgtgcatcatgtactaatttttctgcttcgtcttcacttttggcgcgaatggcataggttccgaatttatgaatgctctgtggcgttaatcccaggtgacccataacaggaattcctgcagatagaatacgctgtatggattccaaaacttcttcaccaccttccaattttacagcatctgctgcggtttctttcatgatacggatggcagagtttagtgcctctttgctatttccttgataacttccaaaaggcatatctacaactaccaatgctctttttacacctcttacgacagatgctccgtggtagatcatctggtcaagagtgatgggcagagtggtttcgtttcctgccatgacattggaggctgagtctcctactaagattacatctatcccggcttgatccacgatgcgagccattgagtagtcatatgatgtaagcatactgattttttcacctttcagtttcatctcggataaaacatgtgtggtgactacctttactgctgattgtgttgacatgatttatttaaatgttccaataattgtttgtgagcctactgttttttgccctaattctactgctattttggtctctaatgggaggaatagatccacacgtgagccaaacttgataaagccggcatgttggtcttgacgtgctttccctccaactggggtataagatacaatgcgttttgccattgctcctgcaatttgacgcatcagaatcgtttctccattattacattcgatgacaatggttgtacgttcattctcaacagacgattttggaagataagctgccgagaattttcctttgtggtatttgaaaaatttgataataccattgacaggaaaccaattgatgtggacattgaatatattcataaagatagaaacctgcaagcgtttcccatgaaagtactccggttcttctgtctcttctatgacaactatcttaccgtctgcaggagccagaatcgtattgtcatcttgaatgattacacgattggggaaacggaagaagtttatgattaaaaagtagagtatagaactggctatcagtatagaatggtttgctactgtgttgtgtataaaatagaattgcagcacattcagcagaatgtagacaagtcctactttcaacaacaatttatagcctgctttatgtattgtcatgattactaatttagatttgatattacggctgcaaaggtatgaatattttcattgaaacagaaaacgaaaaatgaaaattacaatcttgttgcaaatgccaaatatataaagattgcaggaattgcaaataatatggaatccaagcggtccaatacaccgccatgtcccggcatgatattgcctgaatctttgatttctatacatcttttgaacatggattctaccaaatccccgaaattgccgaatataacgactattgtcgaaattgccgctgcatcaatgactgtgattccatcgatatagggagcaatcaccaagcccgctatgatagtggaaagtcctccgccaatggcaccttcccatgatttcttgggagatatgcggggaaacaatttgtgtttaccgaatcttgaaccgaaaaggtaagcaaaagtatcattaaaccatactagcaggaatggaaaatagataatatccggttgccacatatcgttacacaaataggggaagtagatcaaaagagtaaacggcaaagaaaaataaatcagcacatagacactgaatgccagattttggaatgcatgtgagtctttacgataaagttctagaattcctaaaatcagaactgccagcataaaaaacaaatatccgtcaaaatatccgatatagttatgcaaaaagcctgctgtaaacaacagacttccggcaatcagacacattggtcggtttatcttgatatgggcaattcctgccatgtgtccgaactccaatatgccgatgatattgatgataaagaaaagggcaaaaaagcaaagaggatgtataaatatacatgcagttaagattactacaaaaaataatccgctgattgcccgtttgataaagttactcacagtgtgtcgattttaagatttctattgctttattttcgtcgtgttggtttatcatgactttgatggtgccaaatttgtatgctgaatcctgttgattcaaaattacagcttcgataccgttgctctcaagcatatcctttacaatctgagcctgatagaggaggtctgtttcaaaaatggcacaccaatcgttcatggcaaaattattttaattgttatttgttgctgattcattttctgtttcttgagaatgattttgttcttcaagggctttggcttcttcttcctcatctttccaaggacgtttccctaagattttttctaaatcatcactgaaaatcacttctctttccaacagtaattctgctacttgtctgtgttgttccttatgagtttccaatagttcttttgctttggcataggaagtctcaatcagattttttacttcagcatcaatcagttccgctgtcttttccgaatatggcttggtaaagttgaaatccgtttgaccggtagaatcatagtaacataaattacccaccttgtcgctcattccgaaaatagtcaccatggcataggcttgttttgttgctctttccaggtcattttgagctccggttgatacttgattgaaagttagttcttctgcagcacgaccgcccaaaacagagcacatttgatctaacagttgttctttagttgtaatttgtcgttcttgaggcagataccaggctgctcccaatgctttgccacgaggaacgattgttactttcaacaggggatgtgcatgttccagcaaccatgacacagtggcgtgtccggcttcgtgataagcaatggctttcttttcgtttgctttaatcaccttgctacggttttccaatccgcctacaatacggtcgatggcatccagaaaatcctgtttttctacctgctctttatccttgcgtgctgcaatcagggctgcttcattggcaacattggcaatgtctgcacctgaaaatcccggtgtctgttttgccaaaaacggaacatctacatcgtcgcttaacttcaacggtttcagatgcactttgaaaatggcttcacgatctttcaattccggaaggtctacgtaaatttgtctgtcaaaacggccggcacgcatcaaggcgctatccaaaatatcagcccggtttgtggctgccagaatgattacgcctgaattggttccgaatccgtccatttcagtcaacaattgattcaacgtattttcacgttcatcgtttgaacccatattgggatttttgcctctggcgcgtccgatggcatcaatttcatcgataaagatgatacacggcgctttctcttttgcttgtttgaacaggtcgcgtacgcgtgaagctccgacaccgacaaacatctctacaaagtctgagccggacatggagaaaaacggtacattagcttctcctgccatagctttcgccatcaaagtctttcctgttcccggaggacctaccaacaaagctccctttggaattttacctcccagtttggtgtatttgcccggatttttcaagaaagatacgatttcttcaacttcctgtttggcctctgccaatccggcaacatctttgaaagtcactttgatattcgtgtctttgtcaaacaatttcgcttgagatttccctacattgaatactccgccgggtcctcccatgtttttgctcatgcggcggaagaagaacatccatataaacaccaatagcaggatagggaagatatatgggaatatattgccccaaccgtcatattccgtatcataatccaatacaactccgcttgctgccggggtctcttcttgagcctttttaaaatcctcaacaaacacatcctgcggaccggtcataaaataaaattgcgggccggggctggagtttttaaagccgttggccttcagtttagaataattttctatcttatccggtttgatatagacgtttgccagacctttgttcgtgataagtttgatttcttcgacatcaccgttattcatcattttattttgaacttcctgccaggtcgttcgtacgggagcggattgaccgcccataaattggaatccgataatagcaagagccaatatcaaatagagccaatatccgttgaatttaggtgctttaataggttttccgttgccgacaggaggaaagttgaatcctccgtctttgttgttttgcttgttttctgccatataatatgtttcgatatatctataaattattactcttctgtttccggaattctttcgataatgccgtcaccccaaaaatcctccagttggtagaagtcccgcatctctttgtcaaacacatgaaccacgacatccccataatccacaatcacccattgcgcagcattcatcccttctatatggaagggtgattcatgaaggtcttccttcactttttccttcactgcatctgctaaactcgcaatatgtgtgccagaagttccgtgacatattacgaaaaaactacagaaacagttttctatttttctcaaatcaatttttacaatctcatgcgctttgttatcttcaagcgcttcaattactttacctacaatatcttcagtttcgagcattttcaccaataaacaatttcaagggacaaatatacatatatttctacttttacatcgatttatagcgattcttttatagttttgcgtatgtcaaaatggcaaaattaaacaattgtagcatgaaaacttatcagatacctatggtgccgggacccacgtcagtgtcccatgaagtgttggaagccggaatgaaaaattacggttctgccgatatcgaaaaggattatgttgaattatatactgatactgcccgaatgttaggggagattatgcagacgaaaaatcaggtggttatccagacaggcgaaggtatgttggccttatggagtgcgttgaaaagctgtttgttgccgggagataaagtactggcgctttctaccggattatttggctatggtatgggacaaatggccgaatctatcggttgcgaagttcgtacaatgggctttggttttgatgaaacatttacagatttcgacttgattgaaaaagccattcgcgaatttcaacctaaaatgatcacgatggtgcagaacgaaacccccagcggtacgatgaatcctgtagaggaaatcggattgttgaaagaaaaatacggtgtgcccctgctgtatgtggatgccgtatccggtataggaggcagtgtggtcaaaacggacgattggcatatagatctttgtcttggcggctcgcagaaatgtttgtctgctccggcttccatgtcattcctgtctgtcagtcccaaagcatgggagactatagaaaaagtgcagtatgtcggttatgatgctttattgccttttcatacggcagtaaaagattcgtatttcccttacactccatactggcaggggacggcccaattacacaaagcttgcgaactcttgcttgaagaaggcttggagcgggtcattgaacgccatgaaaaggtggcagaatattgtcgggaaagaatagaggagatgggattgcggctttatccggttgccgatgcagtaccttcacctacagtgacagctgtatatgttccggagaatatgacttgggaggagctggatgctcgcttgcgtgaccgggaagttgtgatgggtggcaattatggttgtttgacaggagaggtattccgtatcggccacatggggtcgcaggctaacctcaatttggtaaaagaagcccttgatgttttggaagaaatcgtccgttcataaaaacaacatcaaaagcataaaaaataatattatttgtttgctagaaaataataataataccatatttgctttatggaaacatggaataacggaaaaagagaattgccaaatgcgaccacggtcttgatattggggatattgtccctggtacttttttggctgtatggctttataagccttgtattaggtatcatagcttgggtcttgggcaataaccagcgacgtatttatagggagtctcccggggtatatacggaagcttctttccggaatgtcaatgctgggcgtacttgtgcgataatcgcagtatgtcttgcaactgttacaaccttgtttattatattattatttatgggattgattgtcggagtaggagcaggaatattttcttcagcattttaaattaactaaataactatggactatagatttgaaatcagtaaaccggacagttcggattttagatgtgagattgcaataaatggcgatcagacttttcagcaatttcatgacaagatagttgagactctggggttcgacggttcacagatggcttcgttttttgctttggataaattaggcaatcgtggcagggaaatcgctttgatggagatgtcgttgggcgatgatgacgaagaaaacaatactttggtgatggacgtaaccaccattcgtgaagtggtgaatgccagttgtatcgagttggattatgtttatgatttcttttccaataactatttgcgggtagaatatgccggagaatatgtcggagactctgccgatgtattgccgctttgtgtatattgtgaaggaccgctgcctcatcagtcttcttatgatgtcaatgaagattgggagtttgacaaagacgaagatgatgaatacgatgacagcttcatggaagaattcggcggtacaagttccggtcgtcgtggcagacgaaagaacgatgacgatgatgaggattatcgttttggagatgaagacgacgaatatggtagtgacagctacgatgaagatggcggttacgacgaacgcttcgaaagtctggatgattatattgacaaattataaataccggtgcttgcttaggcaagcaccggctaacgcttctgctttgccttttggaaagaaatgaaaaccctccttgtattgttaggtcccaccggagtcgggaaaaccgacttgagtatagatatagcccgacatttcggcacacatattatttccagtgattcccgtcagatatataaagaaatgcggataggcacagctgtgccgtcggcagaacagttggctgccgtgccccaccattttatccagaccaaatcggtacaggattactacaactcctggcaattcgaggtagaggctttagagcagattcgttcattgttcgagagcagagatgttgtcgtcatgaccggtggctccatgctttatatcgatgcagtatgtaaaggtatagatgatattccgaccattgcgccggagctacgtgcagaattgatggaggtctatgagcgtgaaggcttggagcgtattcgtgaaatgctgaaagaactggatcctgttttttacgaccaggtagacctgaataatggcaaacgggtgttgcatgccgtcgaagtgtgccgtatggcaggtgtgccatactcttcgttgcgcaccaacaaacccaaagatcgtggcttccgcattgtgcgtatcggtctgaaccgtgaccgcgaagaattgtatgcccgcatcgaccgccgtgtagagatgatgatggacgaaggacttgaagttgaagcccgttcgcttttcccgctccgccatctgaatgccttgaacaccgtcgggtacaaagaacttttcgaccattttgaagggcaatacgatttggcggaagctgtgcgcctcattcagcgtaactcccgccgttatgcccgtaagcaactctcttggtttcgtcgtgatactgatatccactggttccatcccgaccatgttgcagaaattatggattttcttaccgccgagggagtggtgtagaggccaatctgtccatcagggcaatgtatcaagcagataagtgttgctgttaaaaatcaatttcacatagaatccctgctttatcaatacaagattgtgcgtccaatccagatgcttgatgggaagggtgaaattatattcctccaattgcgaaatcactgatttcgcaattggagaagtagttttctttatcatccaccatatattgcataaaacattatcctctacaaaattaatgttttgctgttataaatcttaagattttattttaaatgtaaggatggtgtttacaaagattttgcttatgtcgtcgttatctaaaaagaatcactatatttgctaataatttatatacacaaacgaatgagattatgaaatatccgataggaatccagacatttgaccaaattatcgagcagggttttgtttatgtagacaagactgatatggtatattctttggcaatggaaggcaaggtttatttcctcagccgtccccgtcgctttgggaagagtctgctgttgtccactcttaaagcctactttgaggggaagaaagagctgtttaaaggattgaaaattgattcattggaaaaagactggcacacacatacggtatttcattttgacttcaatggtgtaaattttactttgcccggagccttggaggcaaatattgaaggatatcttgctgattgggaaaaggaatatggcattattccgggagtagattttaatttaggctctcggtttgagaaaatcattaaagctgcttatgcaaaaagcggttgcggtgcggtagttttaatcgatgaatatgataaacctttgctggatgtattggagcaagacccatcattgttggaaaaaaatcgcgaaactctaaaagcattctattccatattcaagcgagcagatgcctatttacgtttcgtatttctgacaggagtgacaaaattctctcaggtaagtgtatttagtggttttaaccagccgaaagatatcagtatgtatgatcagtatgaagccttgtgcggtattacggaagaagaattacattgccgttttgccgagcctatccgtgaaatggctgtattggaaggttgtagtgaggttgagatgcaacaacggctgaagcagcactatgacggttatcatttcggcgaaaagatgcaggatatatataatccatttagcatactgaatgcttttgattctaaaaaaatccgtgatttttggttttctacaggaactccgacatatcttattcgtttgatgaatcattttcatgaagggattgaccaattgaccggcagattttattctttggacgagttcatcaattataaggcagatgtggaatatccgttgccgatgatttatcaaagtggttatctcaccattaaggattatgataaacgtcgacagacttttttattggattttcctaataatgaagttaagaatggtttcttggttatggtggcatctaattattttaatacaaatgtaaatgtaagtaatatagctcaagatttagtatttgccctagaggatggagagttggagacattccgaaagatattgacctcttttttggcaagcataccatattctatgcgtagaaaggaaaatgaacgcgaacaggaaagatatttccaatatacattttatctcttattgcgtctgatgagcgtttatactgtttacatcgaaaaggaacaaagtgaaggtcgggtggattgtattgtagagactccaaaatatgtttatatattagaattcaaattggatggttcagcagaacaagctttgcagcagattgaaaataaaggatatgctcgtccgtacgaaatggatgaacgctccgtttataaaataggtgtgaatttttcttctaaaacaggtacagtggaagattggttaagcaccttgtctatgtaagtttttcaactgattctctcttattattttcgtaacatacccttcatttcattgtaacatacctatgcttttttgttcaaaaactaagattttcttttaatcggctgattgataaagcgtaaagagcgataagcctggtaattggtagcgatgctaatttcagtgcattgctttgcttcacttttagaactgatacaaatatactaattttaaccgaaaaagaaaaaaacaggagatttttagttttctgtgtaaacggaaaaacaagaaaagtgtaagtaacagaataagtgcaaaaaaggatttgccactcagacgacaggttggaggaataaaacggtctgtctggtatccgtaacaaatatacatggtgtttatgcttgcaaatcattatttgtaggtattgcgagtgatgattaaaaccgttaattttgcaaattaatggatcgtacgaaaaaaagacagagacagcgggctgtcatagcatgcatgttgttgctgacattgatgccctttttcctcgtgaaagcttttcatgttcacggggaacattcgtgcgtatcccataacgaacaggggcactcccgtcatgattctcctgaaaattgtaccatctgtctctttacgctctccccgtttgtcgaggcggggatttttatatacgattatattccgactggcaggcctgtcaggtatcttatctccggggaaacagatgtcatcgtcactcttttcccgcatttcctccgtgcaccccctgtgtgtttgtcataactcccttgagggattcgcatgccatcactgtgattgcgtgcaggggcttttcatgtcccttcttaacagattataacccgtttatattttttcaagtatgacatttcatgcatatctccagtatgtgtgcctgcttgttgtctgcctatgtaccgtcccttcttccatggaagcacgggtacaggctgaccggcaatcgacgggtacacgcgataccctgctggtcattgaccagggaagcaggcttcccattgaaggggcctatatcctgaccggggaacggttacttgtcagctccccccgtggaatgattgttttcggccatggaacgtgtttcatggatacggtcctcgtgcagtgcctgggttacggttcccggcgtgtgcctttgaacgaggtattcaaagaaagcagcatacataccgtatgtctctccccggacatacaaaaactcggggaagtggtcgtgaccggtgaacgtgccggagcgtcacccaacgtggtgagtcggcgcctttcatcccccgagatcaggaacgcgctgggaacctcgcttgccaccctgctcgaacgtgtcagcggggtaagttccatcagcacgggaaccactgtatccaaacccgttatccaaggaatgtacgggaaccggatactgatcatccataacggtgcccgccagaccgggcagcaatggggggccgaccacgctcccgaagtggacatgaacggcagctcctctgtttcggtaatcaagggctccgatgcggtaagatacggttcggatgcccttggagggattatcgtcatggagcagtctccgcttcctttcagaaaacgctcccttcaagggggaatctccgcactttacggaagtaacgggcgtcgctacgtggctaccggacagctcgaaggtgcttgtcccggtgatttcgcctggcgtctgcagggaacctggtcaaattccggggaccgttccaccgcgcactatcttctgaacaatacgggaaccagagagtatcacgcttccgcctccttgggctatgaccgcggacgtctgagagtggaaggtttctacagccgcttctacagccggacaggggtgatgctcagcgcccagatgggtagcgaggacctgctggcggaacgtatccggcttggtcgccccctgcacacggatcccttctctcgtggtatcaggcctccctgccaggaggtcacccaccaggtcgcattcggcaggatgcggctcggcatgaagaaggggggaagtgttcactggcagagtacctggcagaaggacgataggcaggaaaaccgtgtccggcggctggattctaatattccggcggtttccctgcacctgaattcattccagcatcttctgcgctggaagcgggattaccgctcctggcaggtcgaggcgggaggtcaggccatgttcatcgagaaccacagccgcgcgggtaccggattcgtgcccgttatcccgaactacacggagacacaggcagggatatacggaatcgggaaatatcacctggccaggggaggcgttgaagcaggcctccgcctggatatgcaggaaacccgtgccagtggttatgactggacgggaagcccctatggcgggacaagaaagtttaacaacgtgtcctacagcctgggaggacactatcaactttccaaaggctggaggctcacctccaacttcggtctggcctggcgtgcccctcacgtgtatgaactgtacagcaacgggaacgagctcgggtctgggatgtttgtcaggggagactctgcgatgcactcggaaagaagctacaaatggatatcttccctccgttacggcgacgggatgttcagcgtctgtctggacggttacctgcaatgggtggacggctatatctatgacgggccggagaaagagacagtcaccgtgatttcgggggcatacccggtcttccagtacaggcagaccccggctttcttccgcggtatggactttgacctgcgtttcactccgggcggttcatgggactaccatgccgtcgtctcctttatacgggcaaacgaacggacaaagggtaattatcttccttatattccctccttccgtttcagccatgaacttgcgtggatacacgagacgaaatcgcatcttaggctgcgtctgaacatcaggcaccgtttcaccgcaaaacagaggcggtttgatccggacacggatcttatcccgtatactcccccggcgtaccatctcctcgggttcgacgctgctcttgaacttcccgtgaaacggggacaccaggtccggttcatgctgtcggcagacaacctcctgaatcgtgagtacaaggaatacaccaaccgctcgcgttactatgcgcatgatatgggacgtgatgtgcgttgcggtgtaaattggattttttaatttataacaactataatcaacactaataaataaaaagaaaaatgagaacaattgcatgtaaaaccgtgtgggcacttctgataggagtgtcccttgtcctgtcgctgaactcttgcagcaaggatcctgtaataccagaagacgagacgaagaacaaactgcatgaggacccggcaaaaatgaccgtccgcctcgttgaatgccacctgcacgctgactggaacgagatacagaaggccggaggtccccaccaaaatccggaatccccggctaggtatatgaaacgtgtccaggagatcacttatgaactgaagaccggcagtggatggacccttgctgaaggaagccagggcaagttttacgttcagaaaaacggcgaatataaaaatggaaacaactttaccccggccccggtttacctgatgtttatctattactacaattccaaaggagagttaatgaacggccagttcgtggagaacgggcaggagaatatccaccagcatttcttcaccccggagaacgtgagacctacctttgacgggaaaccggaagctgacgataatgatccggaggctctgatggattatctctatgtggataccacgccctgggacaagaccaaacatgacaacgaggcggaaattacgggaggcactaacccggtaggattaaaaggagttatccggttcctgaaggaccgcaaggagtttgacctgaaactccgcctgtatcacggctacaattctaaaaagaacccgcagacaaacggatttgacccgttctacaagccctctggggtattgatccagcgtggaacatgggatattaacctgagcatcccggtagtggtgttttggagccgcgaggagtttgttgatgtggacccggaggcagatgtgaacctgatcggggaggatagcctggatgaagacagcaaccgcacgctacactccatcatgaaaaccttcagtcttacatggaaggaggcgcttgaggagttcatctcctatacctaccaggcgggggatgtggaagctggatccatatggctttgataatcttgcgtaggatggaattctctctttattaatctacaggcggcaggtggggccgccttttttgtcttgtgcagcgaaaaatcccatctgccatgcttaatccccgtggtttacttggggatgtattgggacatgctttaccatctcaccctgttccatttttcatgtttggcaagttgaaaaaaatcctatacatacaagacgtaccgttcccttaccgacgggtctggaaccgacttcccgtctttcgtgcaattttcccgcttggttactgaacttttttggtctttttccgatttgatgcatataagtttatgcttcctttccaggaaacaaggaagcgtcaaatgtctaactaataaaaaacttatggcaacagttaaaacagtattggtaaaaggaaggagcaaccggtccggcaaattcccgttagtcgtgcaggtttttcacaagcgaaggaaaaaggttgtttatacaggattcagcatcccgaataccctgtttgatcccgtaaaagggaggggtatcgacggcggggaaaacaccccggagtcgattcggaggatcaacaacaggtgcgaaagtatctcaagccgtatgttaaagtgtatttcaatgatagagaagaaatcccgggaatacgaaatagaggacgtattcaggacttacggcgtgttaacccgcgaagccggtttttatttctatttttcacggaaaatccgagagctttgtgaatgcggtcatgagggaacagcccgggcatacgcctccagcctgcgttccatgcagaggtacctgggaaaaaaggattttcctttcataaaactctcttcccggatcatttccgactaccaggggaaagtatgtatttactgatttgtctcgttataaacgggataacggtgcaaaagtcaatttgaaaaacgctactttcaatggctggtatgttacggcttcgtatatgctgataggaaatcaacgagtgtattctcctgatgatgcagaattcggtccgatgaaaatcaatcgccgaggcggtaatttggaacttgccgcccgggtcagctgtgtcaatctgaacgattttcacgatgcgtcggctgtgattaccggtggtaaggcgtatggttataatgtctctttgaattggtatcccaaccgtagtatcttgattggattgaattatacttacatggataatgataaatatgccgacgacaaagggcatatcactatgaatggaaaagctctcaaacaaagccttccgtcgggtgtggattttaatattttacagatgagatttttagtgtcattttaattataatgtatatggtaaacagtaaattactatcgattcttttagcagcggctcttttaggtgtatcttgtaaaaacgatgatgaagatgatattattccggatgcttccgatataaaaggattgtgtattaatgaggtgtattcaagcaatcccgattggatagagttatataacagttctgatgtggagatggatttgagcggatttgttcttcaggatgacaaaggggctgcagaagaatataaaataccttccggcaccaaaatatccgccaagtcgtatctggttttggacggaggtaaggatttttctttcggaatcagttcctcaaaaggggatgaggtggtattgttggataataagaatgctgaagtggaccgaatcagcgtgcctgtcctggaggatggaaattcttacggaaggacggctgacggaggtgctgaatggaaaacttttgacaagtcgaccaaaggaaaaagcaattctgcagagggcgatacgacagaagacccgcaagaaagccgcttgaagctgtttgtcaatgaaattatgtcggctcctgccggtgacgatgtggattttatcgagctttataatgatgaggaccgagatgtggatatcagcggttttattttgcaggatgataaaggtgaggctgaacagtttgttgttccttccggtactgttatcccgtctaaaggatttctggtgtacgagcaggtctctccgggcgaaggcgattccttcatgtttggtctcagctcaaaaggcgataaggttgtatttctggaagctgacggtaaattgatagataaggtggagactccctctttcggtagtgataaaggatctgcttatgcccgaatcggtgacggcggtgctcagtggcaagtggtgagccagccgacgaaaggagcttcaaatgtagcagaggcaactattccgttgttgggaaatttggttatcaacgaggtatatacttttagcgaccagagcagtgttgacgatttggattacattgagctgtacaataagtcaaaccagacgctcgatttaagcggtttgagattatgggagagtggtggacgtgaagaggcgtggactttcccgcaaggcaaaaccattgctccgcaagggcttcttgttattgaatgtgacaaggaaggtttccacaacgatgctgccaattttccggcttggggattgagtaaaggaccggacgaatatattgtgattgctacagctgatatgattgtgattgacagtgtggcttgtccgagtttgaagcagcacgagagctatggccgccgttccaatggagctggcgaatggcagatttttgcccaatatacaagaaatgccgataatgaaggtgcagcccgccaaccggtatccaattctatcggtctttttatcaacgaagtttttaccaataatcaggatgctaaaactcaggattgggatgatacccgtgattttgtcgagctttataatgatagcgacaagaccatcgatttgagcggtttcagtatgaacgacgatgctttgaatcctgataaaaaatacacattcccggctggcacatcgattcctgccaaaggttttctgacatttgaagtgttcaagaaaaatccgaacggtcctgtctttggattgggtaaaggtggcgactgggtgtttctttatgataaaaagggtgttttgatttctgaaatggaggctccggcttttgaggatcatgaaatttacagtgtgggacggaagatcgacggagctgatgaaattgtggtttttaccgaagtctcaaaaaacggaagcaataacaacaaggctgtcaagcggtaattcttgatttttatgagacaggtcctatatttaggaatcatccttgttttgggaatcgggtgtcggaattcggccaaaccgaaggatacgtaccggaagtacgaagtcccgtttgagactgttgctgtctgcggtactgatgtgccggtttataatggaggatttggatcttcgatggtttattgtgaaatagattctactttttggttgcttactgacagaggacccaatatagatggtgagatttctgacagtaaggtgtttccattgccggattatacccctcaagtaggggtattccggttggacaacgattcattggtaatggtgaggcgtattccattgtatgatacaactggggtagcttttaacggtttgccgaatcgggtcgatgacggatgtacgggagaggctgcatacggtttggatggggctgtgcttcacaatagcgggcggagaggaattgacccggaagggttggctgtggctctggatggttctttttgggtgagtgacgaatatggtccttggataatgcattttgattcaaacggcaagttattggaggagttcagtccgttcaacggcaaattacctgcccattatgcctgtcgttgccccaaccgtggaatggaaggactgacgatcaacagacaaaggacggtattgtatggtatgatgcagtcaccgctgcaatgtccgggagacagtttgtcgggcatgtctgatattctccttattctggcgttggatgtagaacaacatgtttgtcgggaatttgtttaccggttggagaaaaaagagcatgtggtgagtgaaatctgttatttgacagacagtacgtttctggtattggaaagagacggaaagtttcccgataaaggccggggattcaagcgtatttataaaatagacatcagccgggcaacaaataatggattgtcaggaaatgttcgggaagttgaaaagagtctgttttgtgatattttacaagtgattccatcttacaatcacgacaaaccggagggaatatccgttattggaaattcaatgcttaccattgtgaatgatgatgatttcggaatagatgcttctgataaaaagacggttttcaaatctaaggtaaacaaggacaatcagatcgaccatagttgcatttatttgataccctggccggttgagccttaaacaaattcagacatagctatttctttcatatttttgtttacaaaagcattcccccgtagaatcatggtgttctggcgggggaatgacgtatttgtgttataacggttggcggtttaatgtgcccattcagcgaagaagtcgtttcctttatcgtcaacgatgatgaaggccgggaagttttctacgcggattttgcgtacagcttccatacccaattcttcgaagtctaccacttctaccgatttgatgctttctttggccagaatcgctgccggaccaccgattgaacccaggtagaaacctccgtgtttcttgcaggcattggtaacgtcaatagaacggtttcctttggctaccataatcatagagccgcccaatgactggaacaggtctacatacggatccatacggccggctgttgtcggtccgaagctgccggatgccataccctgcggagttttggcaggaccggcataatataccgggtgtttcttgaaatattccggcatcggtttgccttcgtcaatcatctgtttgatgcgggcgtgtgcaatgtcgcgggcaacaatcagcgtaccgctcaggttcagacgggtctttaccggatatttgcttaattctttcaatacattttccatgggctggtcaaggtcgatgttgacagccggtgccagagccggtgtttctttcggcaggaagcgagccggattcttttccagttgttccaggaagataccgtcttctgtgattttcgctttgatattgcggtcggcgctacagcttacaccgatacctaccgggcaggatgctgcgtggcgtggcatgcggataacgcgtacatcgtgtacccaatatttgcctccgaactgtgcgccgattcctttttcgcggcagattttcaaaatcttctcttcccattccaaatcgcggaaggcacgtcctccttcgttgcctgaagtcgggagattgtcataatatccggcggaggctttcttgacggttgtcaggttggcttctgccgatgtgccgccgattaccactgccaggtggtagggtgggcaggctgatgttccgaggtcgagcactttctgctggatgaatttggtcaatgtctcttcattcaacaatgctttggtctgctgatagaggaatgtcttgttggcagaacctccgcctttggtgataaagaggaattcgtatttattgccttgggtggcatagaggtctatctgtgccggcaggttggttccgctgtttttctcttcggtcatggtgaacggcactacctgtgaatagcgcaggttgcggtcgcggtaggtttcgaacacaccttggctgatagcctcggcatcattgcagccggtccatacattttcgccttttttaccgatgcagatagccgtaccggtgtcctgacaagtaggcagctgaccttctgcagccacaacctggttcatcaacatggtgtgtgccacaaatttgtcattgtcgctggcttccggatctttgagaatgtctgccaatttctgcaagtgggaggcgcgcagatagaatgatacgtctgcatatgcttcgcgtgccagcaattccagaccttctttttcaattttcaatattttacgaccgtcgcactcgatggtttttacataatcctttgtgagcaagcggtattccgttgtgtccttctcgataggaaacggatcttgatacttaaattctgccatactttaaatctattaattaatgcgttagtttattctgtcgatttatgctacgaatttaaagctaataaatgaaaaatcgaacgttttactgaaatttttctgtaattatttcctcctcctctttttctgtgttcgggacggaggtgtacagacacacggaatcggaactgtttttgccgtcagcccgggtggtaaaggtataaaccgatagatcgtttgtgtgtatttgggggttgagggcgacggtggtttcactgtccgtaccgcgagttcccaattcgacaagctgataggtgtaggtcgaaaaggaaatggcgacggcatagagccggtcggtcgtgaagcagtctatccgattgtagacacagccatgatgtctgaatgttaaagtacggtcggttgtattgatatccagtgtcatgtcgggcttttccagaatcccggcagaaacccggaatttggaagtgtcaacgtatcctttgtatccttgggggtgttcgcttttcaccacggtggctgctgtagcattggcatgcataaatcccgcattgccttggaagtttcggttgccttcggggaagccgagacggatgacttcctgcagccattgtttgcaatgggccactgtgctgaatgctgtagtacttctcttgcgggcttcactgtggattttgtgattgaagccggaagaacgcatcaggcttttgccgtctttgttccgataaatgacgacatgtccgaattttcccttgatatttccaagggtagattgtatttgtgccatatgttattgttttggtttgtgttcgtttacaaatataatatagaaaacaagaaatgcaactgtttcggtcaaaatcttttccggttcacttctataccaccactatggtatttccgtattgaatgctatatgaatcctatataaatgctatacgaatcctatattcataacatttttatagcattttatttgctttgcgatagctgttgttgtatatttgttatagatttgagttggaaatcatttaaaattgatatagcgtatgaagaattcatccttattggcgaaagctttgttggagagcggtccgttgcgtgtgggtggagtgacctattttttgcatggcgaccgtatcagtgcttgcccttccaagcgaggcagttataaaaaacggtcggacaaggttatggagtcgagtaaccggtttggcgaagtgcgtaaattctggagcgtttaccgtcaggcggtggacgaattgccggtgtggcaagtgatggctcgtgagacgggacgtctgcgtggcgatttgctttttcattctgtcaatggagggtatatcgatccggggaaaggagtgagcgaatttgagcgttttaagtttgctgtgggagtgttggacgaacctaaggtcatggaggtggagcggaatggttggaatatatcggtgaagtgggaaaatgggagggaatgggcaaaggccggaagggatgatgtggcgtatttggggtatttctatggttctcagccacgggcgccccgcatgttgtcgttggtcgatgtgtgtagggaggatggctgtttgcaggtgagcattccggatggcggagagccggagcagacagaactgcatttgtatctgtttttcggcgaccggaaaagcgagcgtttttcttccagcgtttatattcatgcgtaaatgatgtttgttatgaatagcgaggtgattttttttgttattgtggcattcctttgtctggaatttgtggtggaaagagtgttggaccggttgaatatgaaagcgatgtctcctgtgttgccgtctcggttgcaggggatttacgatgaaaaggagtacaaccgttttgtgaattataaaagggaaacgggacggttggaatggctggagtcagtggtaggctttatcgtgatgttgggtttcttgtgtgccggtggttttggatggttgaacggatggattgtcagctggacagacagtgtggtgtggcagacgcttctgtttatgggtatattgtctgtggcatccggtatattggaaatgccttttgactggtatgccacttttcgtatcgaggagaaatacggattcaataagacaacatggaagacttacgtcggtgattctctgaaagggatgctgttgtcagcattgttgggaggtttgcttttgtctgttgtcgtatggttttatgaatgggcaggtcctttgttctggctgtatgcctggatagccgtgacggtggtgtcggtgtttatgtcaatgttctattcgcaattgattgtgcctttgttcaataaacagacacccttggaacagggcagtctgcgtgataagattcaggcttttgccgataaagtgggtttccgcttggacaatatctatgtgatggatggttcgaagcgttcgaccaaggctaatgcctattttaccggtttgggaccgaaaaagagaatcgtgctgtacgacacattgatagatgaactgacagaggaggagattgtggcagtattggcgcatgaagtgggacattataaaagaaaacacacggtacagtttatgctggcatcggtattacagaccggggttatgttgtggctgttttcgctgttggtcaatgaagcggttttgtctcaagccttaggtggtgacagggcctatttccagttgggattggtagcctttgctttgttatatacccctgtcagcatggtgttgggtttggggatgaatgcatggtctcgtaaaaacgaatatgaggcggatgccttcgctgcacaaaattatgacggacagacattgatatcgggtttgaagaaaatatctgtcaaagcgttgagcaacctgaccccacatccggtatacgaagcggtgtattattcacatccctcgctgctgaaaagaatcagggggatagaaaaatgagctatagttgctgcaatgctttccagtcaatccggggttctttgtttgtcggcttgcactggaattttgttcccattggcacggattcgttaaagaaacctcccatttgcagataaaaccgattgtcgtcagttttgcctccctgatagtcgagacggacttgtgcatttgccgtagcatcgtgtgtgaaagttgcgtcagtaagcttggtccatttgccttctttgctgcgtgcccattggttgccgaagaggactttacgggacagatagccttgttccggattgaaattttcaaggaagctgtggggatgtttgtaccatgtgtcagtctgtggacgtaagaaacttgcaattaatctccattcgtgttcatctgttgcgtagaaataggcggtataggtcgtgtttccttgtccgtccggtctcacttgcatcagaaatttgtatgtctgtccggctttccagggatatctcaaataactttgtccgcctgctccttcgttgccaaattctccgatatgtacgtctttgccttgacggagcagtttgattttttggtcgtcaggaatcttttggggatcttgggtgtcaaaagggctccatacggagaaaaggatacgacgttcagtcggggagttgtattgcattccgaaatagccttctccgaagccggctgccatgtaatagctgtgcatcgtttcgccttcttggggaactgtaatttcattgtagaaccattctgtgtctccttccggtagcgtatatgccaaatgaacggaagggccacggcgtccccaatagtcagagaaatctttcacataattgctttttcctttcacatggtctgctatcaattgtttgatttcaccgaaagtatcgccatcctttgagatgccttgtaagtcgatgcggacatatccggcttgccgtatattgatacttccgacaggaatttgtgtgtagtcatccgattgcaggttgactgtgaaactcagttgtccatagctgaccttgatttcggaatgtcctttggcatatagagacagatcggctgttgtgggctgatggaggtaaaagtaaatactgacaattgtttccggatttgtccaatgtgcaattccgttttctgtaatttgggcaccatcttgctggcgggttacatagccgttgccggaaattccgatgacaagttgctgcggttgtgcaaataagctgctgcatagcaagaatgcaagtaaacatagattcttcatgtggatattgtttgattttatgcttcgtaaatacactgtattttttctttgaatttagaaaaatagtttgcaaaatattattgtattctatttaggaccggcgttgtgcgaatgaagtatcctttgctgtaatgtatataaatcgctatcggatgggtaatgttttttagccaatatgtcatatactgtctttccaccaccatatgttcctgacgggatgtgtaatgaaacatttgaagatgatataaggtagtcaacaatttctaattgatcttgaattacagcttgttcgaccggagatatgttatttacctttacaaatgggtctgctttacctttttcgattagatattttacatattcaatagatgttattgcagctacgtctaaagcattcgtttttaatcctgaaacagaatccttggtaactttatttggatctgctccaaattttaaaagtatggcgatatatctgatatcagctttgtattcagaagtcaagaatctggatgcataaattaaaggtgtcgttccatcaaaagcagtaaaattagggtccgcacctaagcgtaatagagattcaacggatttataacgaccattaaatatcgcccatatcagtagattcttgtggaatttggaatccaattcatctatatcaattgctggattggaatttacgaactctctcatttttgcagtatcttcggattgaacgagttttgcaagtgtccaaatgtgagaatcccgaaaagaatcaatactgcgaaaagtcatgttctgttggcaagaaattgtgtgaatgagaaaaaatattatgaatagaatgtatttcatttgatgcatagaggatgtatattttttagctacctgcaaaggtagctttttttcattgataagagtgaagaactatcctttgaatcaaatatgcaaatcaatgaaatagcgaggcaaataccaattgctccccctattataacgttaattattttctgccatttttttatattgttattaggttgtatgattctacaaacggactatcccgtaaaagcaatcattaattattgcttacagatgctatatcaacattcccaagaaataatcttattcgattaaaggctttttttgtttctggtaagaagtcttcattatcgacaatattggaatatgtcatttgtaatgcactgtattgtgggttattgactaaccttgctgcaattaagccaataatgcaatacacatcccgccctgaacaatatggattatattcatatgttggctctgtattatacaatgtatcaatagcattcaaagaagaatatttcttttcataatccaaggccaaaggaagcaattcgtctaacgcttgaacaacagagtctatgtcatgtatggaatacaagatgaatcgatctttacgtttgtattgcatttgccatctagtatcttttgtccattccttatttattattttctgtaaaataaatagatttaaaaaagcggtataatttaggtggaaatcattcttgttgcaaatgtcgtggataatatgatttttaatctcgacataaggaaatagatggatctcattctgccaataattatgatcaaagcttatgactgctgtatgactatctgtgactttgcgcaaagcaaaatccttctttacaatcttaaaaccattatttgttgcaaatgtttcaagacgctttaacagttctgtttttactacagctaatttcatagtttactcctttttaccaaaatggttttacatataaatgataaacgttttaatccgttactcaccgagtcattcacaccatatttctattacaattatttttttagtttttggggataatatgtagcttattgatgtaatatacattagatattacttctactaattctagcttaatgacatatttgtcaattaagctgtcactataattgggtataaaagccttcctatcaaagtgcttgtcttgaaatgtaaataacactccgtctgtacgccgtgtataataaccatttattggtacaatagctgtttgtacatttgtgcttttctgtacataacaatatgaatagaataatgtccaaatagaaatatacagcatcacaaaagactttattccaaataacactttatctttttgccttgtagccttgaaaataaaagctatcaatgttactgcaatagaaatagcagcaataacaatggcataggtataagttgttatcaaaaaattatgtctcagaatatatataatagctattaatcccaatgcaatgagcaatattacattattgtacttcttcttcatttctcatccttgttaattctacattttctgttatatcgatgttgtcctctgaacttcttcatttttccatccatttatacgcaaaacataaatcacgacaggtaatcagttagatattaatcgattttattattttataatctgtaataccgtaaagcctataagtatcgatattttatcttatccatattctctgctaattataatctcctacaaaggtataagaattaccttgctaatcaaccggaaatgattgatttttcaaaatcaaccaaaaataattgataatagattttattgtaaatatgcccgcactgttgtttgttttccttttgtaatacattatatttgcaatatttgcttaaaaggcaattccctaataagcagaatcagcgaaattagaaattttgggatgataagattggttttgaaatattggtggatgcttccgattttgttatgtgcttgtatggtgggattgatatttttgtttactacagttcaccctatcatcgaaggcatcgtaggtattttattgctgttagtgattgttcttcttttgatatcctgggtgacgttgctcattaacaaaaaatggtgtcaatgtctcatatcacttgtcatttctgttaccattataattatgctttggtttcctctggtaatggctgcaatgtcgggacaggaagaatttgacatgaaccataagattccaaaggattgggaggctcaatatgcaccttctcccgattagttaatcatgaagcgttttttgtcagtatatcttttttttagtagtgtgatgatggaaaataggatgatacctaaaaggtgaatcgcattaaagaacaataagaatacccaccagtacaaagacgtgccgtattcgcctttatagtgcaggcaatagagtagaggaatattgtatcctataaaaacaactaagttccatattgttgttctgtttttcatcctgatagctagtataagagtgaatgtcaataacataatggcatatattaacacatcgtctccaacaatataaaaattaagtgcatagatacttgttattagaaaagcacttgctagaatcaattggatgatatgatttttcattttgctttatagtgtttagaataaagtcatacgttagctcaacaaagttataaaaaatgctgtttcttaatctatagtgggtcatgttttgtgtttcctgtcggattgtaaatatgcccgcgctgttgtttgttttccttttgtaatgcattatatttgcaaggatgatataaaatatttgataatatgagagcgattattattacgattggggatgagattctgatggggcagattctggatacgaattcgcggtatatggcgaaacgattgacggatattggggtggaagttgttgaaatgttgacaatacccgataaaagggatgaaatatttgaaacggtggactatgctatggagcagagcgacctcgttttggtgaccggagggctggggccgacaaaggatgatgtgacgaagaaggtgttggctgattttttcgggacaagacttgtgtttaatgagcaggctatggagtggttggaggagttgttgcgccaccgtaatctgccgatgaatgaaggaaaccgttcgcaggcttatctgccggagaattgccgggtgttgcataattttaagggaacggcttcgggaatgtggtttgaaaagggatggaaatctttaatttcgatgccgggagtgccttttgaaatggagcatttgatggaaacatacgttattccggatttgaaggctaaatatcctaatttgcagttggaatatcggatggtgaaagtatatgatgtaccggaatcgcaattggctgctcatctggaaaaatgggaagatagcttaaaggaagggtttaagttggcttatctgccttcaccgggtatggtgcgcttgcgtattacagcaaaaggggaggctgtgaagcgtttggaggagatgtatgagagtctgaagctggaattgaaggggatgcggtatacagagggtgatgatgctttggaaattcaggtggggcagttgttgagagaaaagggtgtgacggtagctacggcagagagttgcacaggaggtgaaattgctcatttactgacttctgtgccgggtagttcagattacttcaaagggtcggttgttgcctacgccaatgaggtgaaggtgaatgttctgggagtgaatccggccgatatagagcgtgagggtgtggtaagcgagccggtggtgttgcagatggctgaaggtgtaaggcgggtgatgggtacggattatgccgttgcaacttcgggcgttgccggtccggcaggtggcactccggagaaaccggtgggtacggtttggattggtgtggctactccccggggatgctttgcccgcaaatatgttttttcttttacacgtgaacgaaatattgcaaaggcagcagctaaagcattggaattgttgtcaatggaaatggtatagatatgaagaaacgttatgtgataccgctgggagtggtggggttgttgttggtgatgtatttggctggtccgcgattggaacggacggaattgaatcttgaattgccgattgtggatgttggtatcgaaggtattgaggattatgtgggacagcgggaaaaggttttgccggtgaagcctggaaatgagagtgttgtggtgtgggcggattctgtagcacaaccgacggagtatgtgttgctttatctgcatggttttacggcaagtcgttacgaagggtatccggtgactcacgattttgttaaaaaattcggtgtcaatgcttatttgccccgtttggctggacatggtttgctggttgatgagcctttgttggatatgacacctgcaaatttgtatgaatctgctaaaaaggcattggtcatagcgcataaattgggcagaaaggtggtggtgatggggacatctaccggttgtacgctggctttgatgttggctgctgattttccggaactggtggacgggttgatactttactctcccaatatacgtattaaaaatgctgcagcacctttgttgagcggaccgtggggattgcagctgtccagggctgtgcatggcggaatgtatgccgtgtcggatgatcctgccgacagtgaggattgcaaatattggtattgcaggtatcgtgtggaggcgcaggtttatttgcagcaattgctggatatgcggatgaagcgtccggagtttgccaaggtgaagcaacctttgtttttaggttattatttcaaggatgaggagcatcaggacgggacggtagaggtgaaggcggctttgcggatgtttgaggaggtgggaacgcctgacagtaggaaggtgaagatggcatttgcggatgccggggcgcacgtgattgcttgcgaattgacttccggagctgtcgaagaagttcgttctgctacttttgattttgcggagaaggtgttgggtatgcagactgtgaattaattgaactgaatggctcggtagccctggggaaaatgccttgcagccaggcaagggtcattccatagttgctgacgggaataccggcatctatggccggttggagccgattgcgcaactgacgcgctgttaccatacaacctccgcattgaatgatgagggcatagtcggtaaaggggcggttgatgcggtcaagtccggctacaaaatcaaattcaagggatttttctgtgcgtttttgtagcatcatcggtattttgtgccgtccgatgtcttcacatgatacgtggtgtgaacaggattccagcatgagaattctgtcgccgtcttgcagcttggcaatttggtgtgtaccttctaaatatttgggaaaattgcctttgaaatgtgcgaatactatactaaagcttgtaagtggcatatctgcgggtatcaagagtgccacttttccgaatgcctgactatcggtgactactaagtccggacgcaagggactgcgctcgaagaaagccggaatttcttccggttgcaatacaatactcatgcagcggttgtctaaaatgtcccgtaacatttgtacttgtggcagaatcatgcgtccggtaggtgcttcggaatctatcggcgttactagcatgattaattggccgggctggattagactgccgaggagagaacgtttctccggagtgccgaccaattggataatcgactgcatgaggagttctctgtcaggctcaacagtcgagaatgaaagcagctctttgtgataggtttcgcggatgtgctgctgtaattccggggttggagtttcttgttccgatttattgtgcaggaggatgaatgcttgtcccaaggcctggaattggtgtattagtttttcttcgtattctccaaattgattgttgctaatgacaagaatagcagcatctgcttgaagtaatgcttcatgtgttttttctatacgtaattctcctaatgtcccttcatcatcgatgcccggagtgtcaatgaatacgacagaggctacaccgggaatttcgtagcttttttttaccgggtcggtggtcgtgcctgctactgcagatacgacagctttttcttgtcccaggatgcagttgataagagaacttttaccggcatttcgtctgccggcgatgacgatatgtactttgtccatgtgtttcgttgtgttatttatatgcttttacgtcttctgccgtgattgtcggactgcctaaaatgattaaacgttcgattacgttccgtaattcacggatgttgccggtccattcgtagcttttgagcatttcaatggcttccggggcaatctgtttgcgtgccgtgcccatctctgcgcagatggtgtcgagaaaatattcggtgagttccgtgatatcttcccgacggtcttttaaagctggaacctctatgatgatgacgctgagacggtggtaaaggtcttcacggaaggtgccttttttaatctcttccttgaggtttttgttggtggctgcaatgacacgtacgtctacgttgatgtcagagtcgctaccgatacggctgattttgttttcctgaagagcccgcagtacttttgcctgtgcttcaagactcatatctccgatttcatcgaggaagagcgtgccccctgtggccagttcgaattttcctttcttttgtttgatggctgatgtgaacgaacctttttcatgaccgaacagttcgctttctatcagttctgaaggaattgcagcacaattgacttcgatgaaggctttgtcgcggcggttgctctgctcatgcagttggtgggcaaccagctctttgccacagccattgggaccggtaatcaagactctggcatcagaaactgccactttacctatcatttcccgaatgtggttgagggctgctgaggaaccgatcatttcgtattttttgctgactttggttttcagtgtttgctgttcctgcaaaagctggcttttgtctgtggcatttttgatggttatcaaaatgcgattgaggtccaagggcttttcaatgaagtcgtaggctccttttttgatggcctcgatggctgtgtcaatggtcccatgtccggaaatcatgacaacagaggtttcgggcgctatttctttgattctttccaacacttcaataccttccattttgggcattttgatgtcgcagaatactacttccggtttgtttgtttttacggcaaccaatccttccagcccgttttcagcgatagaaacttcatgcccttcgaaggataggatgtctttcatagaattacgaatacttctttcgtcgtcgattacaagtatttttgccatagttgttttttttatgcaaacgacaaaaataaaaataaatgtgaagaagaaaaaggaatgtgtgaaaatgtatgaggttttcggatttgtttcttagttttgtaacattgaaatgaataattgataaatgtataagaccaatgaaaaggctgtgtatatttctgttgatgcttttgtttttctgcccggaaagttttggacagcgtaaaaaagtgggacttgttttgagcggtggaggtgccaagggagtggcgcatattggagtgttgaaagtgctggaagaggctggtatcccgattgattatatttcgggtacgagtatgggcgccattgtggggggattgtattctgtggggtatgatgccaggacgttggacagtttggtcagggtgcagaattggtcttttttattgggtgataaggtgtatcgtgatgatttgccgttttatgaaaaggagtcgatggagaagtatttggtttcttttgctttttcaccggaaacgggattttctgtaccggcaggctttgtcaaaggaaacaatatctataatcttttttctgatttgaccataggctaccatgattcgatctcttttaaagaattgcctatcccatttgcttgcgtttccgccaatatggtggatggggctaatgtggtgatggattccggtgttttgccgcttgcaatgagggccagtatggctataccgggtgcttttgctccggtggtgattgacagtatggtgttggtggatggcggtatttctaataactttccggtagatgttgccaaaaatatgggcgcagatattacgattggagttgacttgagtaccggtttgaaggatatggagggattgaacaatctgatgggcattgtggaccagttgacgtcttttatgggaatgcggaattatgagaagaatagggaactggtggatttgtatatgaatccggatctgaaagggtatacagctgccagcttcaccagagaggctatcgattccatgattctcagaggagaacgtgttgctcgggcaaattgggataatatcatgaaattgaaaaaggctatcggtttggattcctgtgaaaatgcagctccacatttgaagcctaaatttgaagccaaggatagtttgatgataggggaaatccatgtaaaaggaatgcggtcgcaggatgaaatatggttgcgcagacagttgcgcattcatgaatattcaaagatttcgttgaatgaattgcaccgatctctgtcgtttttatatggaacaggggcctttacgctggtgaactattctttggaaggcaaagaaccctataatctgactttgagtgtaaaagaaaagccgggaagttcgtttaatttcggtttccgttttgactcagaggagatggcttctattttgttgaacacaacgcttagtcaccgtgctttgcgtggctcgaagttggggttgacaggacgtttgagcaagaatccttatgtggagctggattattcatttggtagcactttcttacggaaattgggtatttcgtatatgttccgatacaatgatctgaatctttattataagggaaacaaagtggacaatctgactttttcttatcacaagggggagattaatttgtcggacatatatttgcgaaattttaaatttctgatagggttgaggtatgaatatttcaagtttaagtcgaagttgtataattcggattacatggaggataatttgccttcaaaggggatgttgagttattttgtttctgcgcattatgatacatatgaccgacggtatttcccgaataaaggtatttcatttaaggcggagtatgctttgcatacggataatatgctgacgtatgacgatggttcgccattctctgcattgtcggtggattttcaacctttgattcgtttttccaagcgggtttatttattgccggcgatttatggacgtatattaatcggtaatgatgtggctgcaacatatcagaattgtatgggaggtgaagtccccggacgctatttgaatcagcaattgccattccatggaatccacaagttggaaatgtttgacaatactttgttggtagggcgtcttggattgcgtttgcgtctgtggactcgtcattatctgactctatcaggaaattatgcacgacagacaagcaattttttcgatatgctggatgaggggaataatctatggggaggtgctttcacatatgcctataatagtttgatagggcctatcagtgttacgctggacggctcggattgggataggaagttgggtgtttatttcagtttaggtttttatttttaatgtggaatgcttaatagtatgaatagaaaattttacgcttggatattagtttcgctatgtttgttggttgcatgttctccaaagttggagtatcaatatgcagagggtaagatttatggtacatattatcatatctcttatgaggcatctcaaaatatgaatgaagaactttggcaggaaatgaatcgtatcaatgcttctctgtcgatgtttaatcgatcttctgtgatctcccgtataaataacaatgagagtgatagtgtcgattctttgttttgcaggatgtttgatttggcaaagaaggtaaaccaggtgtctggaggcttgtatgacattacagtggctcctttggtgaatgcctggggttttggttttaaaaaagagagttttccggattctgctcggatagattcattgcgtctgttggtggggatggataaaatagccttgaaagagggacggttgataaaacagttgcccgggatacagatggatgccagttctatagctaagggattgggggtggatttggctgcagagtatttggaagcaaaaggagttgtcaattacatggtggaaatagggggagaagtgagagtgaaaggtaatagtaacaaaaaacgggcttggcgtatcgggatagaccgtccggaagatgatgtgacagcacagagtcgggaactgcaaatggtgttggagttgaattctggagccttggcaacttccggcaattatcgaaacttttatattcgagaaggcaaaaagtatgctcacacaatcagccctttgaccggatatcctattcagacagaggtgttgggagcttctgtatatgcgccttcatgtatggaagcagatgcttatgcaacggcttttatggtgatgggattacaaaatgccaagcaggttattatggctgattcagatttggaagggtgtttgatatatgaagagaatggtgttttgaaaacctgggtatcggaaggattaaaaaagagaatactgtcagaagaggagaaatagacaagtattctcaaggaaggggataattgaaaatgagaaaatacgtactgattgtaatgttgttattgttagttggagcgttgtctgcacagacaaacaggacttcggcattacaagattctgtgcgtatagatcctggcattaaacgtgaaaagcctgctgagatacggcaattacatgtgaatcacagtttgcagcccgttaatttgcaggtgtcgggagcaagaaacagtacactttttttaccggatagtcttattcgtgatacactcaaatacgaatttacgaagataaaagaatttgcttataggcgaaaattgacccgagagttgtataaaatgttttttgtaaatgcagcttccggtaatatcaatgtgttgcatacacaaaacagtgaggaccgatttaaagattttcgaggaaaaacaatacggcttatatctataaaagtgttgcctccctatggaacaaatgtgtatgacagtgtttataatgaaggagatatcagttggtggaaagatgttgtaaacaaaacgcatatgggtacgtcagaaaatgtcatacgccgtcaattgacaattaaacctggaatgcaggtaattccctttgaactagtgcaaaatgaaattttattgcgtaaattagattatatagatgatgttaatattcgagtggaggagtctgtcggctatccggaatatgtagacatagtggttgtctgtaaagatgaattgtcgtggggaggatcggtagaaacgaatttccttaacaatttcaagttgggcattaataataaaaatagctttaaactggggcatgttattgactatgagtttagttatcgtggtacaaaagataaaaaatggggtaataaactagagtataaagccaatagtatttggggaacgcatatagatattcgtggcttttatcgtaatgatttttacgaaaaacaggtgagaattgatatagaacgtcattttttaacagcgcaaatgcgttgggcgggaggagttgctgcaggaagagtgttttattcagaggatttgccggataggaatgtaagccgcttggatgagttgtttaattaccattttcaagatgtatggttgggacgctctttttctctgcctgagcggtatagctataaccagaatgtctatcttacaggacgtttttttacaactcattttattcatcgtccattggtagatggagataccaaccacttgtattataatcgaatgaatgtgcttggatcggttgtctttacaaagttgaagtattataaagcaaatttgatatacgatttcggtcgcacggaagatgtccctgccggtttgtttgtcagtgcaaccagtgggtttgaatggagtgagtatgataattacgtatatcttgcaacagaagcctgctattctcactttaatcgccatacagagcgttactatgcttttcgggcagcattgggatcgtatttgagtgttgatggatttgaacggggaatgttggaagttggagcaaaccatattagtaatttatgtaatctgggagctttgcgtttccgtttttacaatgatgcacggtatataagaggttttaggaggtatcctgctgaccatttatatatggaagatacggatattcgtggcttttcgtcagacactttggaaggtgtgcagaaattgacggtttctgttgcggcaacactttttttaccttatatcaagaaaggtttccgtacagccatatcgacatttgtggatgcgggactcttggctcctcaaggcgaacgattatttcatacccagtcttattgggggataggtttaggggtgaacttgcgcaacgataatgttgtgataaaaaatatatgcttgcgttttacattttatccggtgattcctccagacgggcgaggtgtacaggtaatgatgtctaatagtccggggacaaagttttatgattatcgtgtgactaagccacaggtaatccagtatgaataatttattgtttatagaatatatggaaatatcatcttctgttatttggttgggttttattatagcattgacagcttctgtttctacttttttaggagctatgacttcgctttatttccgtagtgtcaatcagaaaacgctttctgtgattctgggattcgccggtggtattatgctttatattgcctttatgaaattgatgccggatgccatcagtgtcctttctgaaagattgtcttatcaggagacaaagatatggagttcggtggctttctttctgggtataactttgttgtatcctttggggtatcttgctaatttttggaaacggagtgaaagagctgagtatacagagtctatccggcatgaaaggcatatagctattttgatattgacaacaatatctgctcatagttttgtagagggggttgcaacgtttctttctatattggcaacgccatgggtagcagtacctttggtgatgtctattattatgcacaactttccggagggaatgacgataggcgccttatttaatagaatcagtgatacaatgggtcgtaagcgggccattatatatagtttgatttctgcgcttgtcgagccgttaggtgcaatgacagcatatatttttattatgaattattccactccggtattgaacggattattgcgtgcttttctggcaggactgttggttgcaacagcgctgaatgagttgatacccaattctcaggtgaaaggctcgcgtagtatatctatggcaagtatcattgccggtatgttcattatggcatctgttttgattgctggtacttttgtttagtttttacgttcttttttgcgtttgaaaagtcgtttaaaaaatccttcttttttctcgttaccagatgacagagtgtctgcctctgtgtgattaactttgtcgagtttgcgattggtgagtttatcgagaaaatttagatggtctttaaactctggtgtttttagattatcggcatcattcatgataggaaccgggaaactgatatttttccatcggctgtaggtgttgctgcgttcgcagcgtttcatgaattctccataaatgggtagggccatgctggctccttgtccaagacggagtgaattgaaatggatatttatatcgttggctccgacacgaacacccacaactaggcgaggggtgtatccaataaaccaaccatctacttgattctgggttgttcctgttttaccagccatttcattctgtagtccataagtgcttctaagtctttggccggttccttcgttgatgacagaagccaatatgttgctcattatatgtgcttcatttgccggcagtactttttggccgacagatttaggtgcttggtatatgattttaccatcacgtgtccggatttcgtcaaggtaatatggggtcattaacacaccattattagcaaatgccataaaaggggaaaccatttcccgcagagggatgtctgcaactcctaaagctagagaaggataagggggaagggcagttgtgatacctaaagagcgtgcatggttgataacaacatctatgcctgtttgttggagaacttcaacagctatggtattgatggatttacttaaggctcctttgagggtgtagtaaccttcgtaattgttatcagcgttacgtggagtccagttatcgtattccggataggtccgttgttcgttggagtagtaagcgtcaaggcgagctccattatggatggctgcgctatatacgactggtttaaatactgaaccaacttgccggggggctatgacttggtcgtattggaagaatttgtaatccaatccgcctacccaggctttgattttgccgttttgcgggtcaatggcaattactgccggctgaaagatttttaggtagtatttgattgagtctatggaagaaaattctacttctctttcttttttttgtgcatcatacactaccattgttttttttcggtttaactcttctttgatttctgtttcgctaagtcctttgtttttgagttgtttgtatatgggactattttgtatggcatttttaagtatagtgggatttcgactccatggttctcttttacctaaatgtgtatagtatgattgttgcagttttggcatgtgaacggcaacagcctcttctgcgtatttttgcatttctgcatctagtgtcgttgtcagaataagtccgtctttatatagattgtattgtgtatcgtgagtggcattgtaagcttccagtatctttactgcatcttggcggatcagctcccgtaaatagggcgcaagaccactatagtgattgtctggcttgtatttaagtgatagtttttgagcttttagagattcaccttcttgggctgttaaaaaattgtattttaccatttgattgatgacggtattacgtctgcgtaatgctctttctgggtgaagacgaggattgtagtaggaaggaccttttaacattccaattaatgtggcagcctgtgactgatttaaatctgtagcagaaactgaaaaatatttttgagcagcactttcaagaccaaatgtgttttcaccaaaataaacggtatttaaatacagggtaagtatttcattctttgagtaaatgttttctaaacggtgagcgataaacatctcctttagtttgattatcggtaagaggtttaccggttgttcttctcgaggatagaggttttttgctaattgctgactgatggtactgcctcctcctgaacttcgtttgccgagtaagaatgttttaaagaatactcgtgccatgctgattttatcaaccccttcatgttgatagaaacgagcatcttcagttgcaactaaagcatcaatagcattgctcggaatatttttataattaatgtttgtgcggttttcaatataatatttgccgatcatctcgccatcttccgtataaagcatggatgcttcatcattacggatatgacgtagttcatcataagtagggagtgttccccagaatccgatatatacgctggcaactaaaagtgcgcaaacgcagataatcgatatgattgccagaagaaaatactttaatattctccaagttatatacttgtttgtatgtttgtttctttttgaggattttctttttctcgttgccatgatatttatttgattcttggggcaaagatacattgttggttgtttgctttcaaattttcagaaagcttctttgaacgataattatgagatggactatggggtgaatatcttttgttatatttttattttaaactttatataatcgtcttttttatgctaagtatgaatttaatatcatagtattgaataaaggttttctaaaaacaaagcaggaaaatgaaatcaatagtatttttctacctttaattttaggcagaatcttatttttgttatctttggggggtttaaaaatgaaagctatgttaaatattgcattatttggtcctccgggagctggaaaaggcacccaggcaaaacggattgttgagaaatataatttagtacatatttcaactggcgatatgattcgcaaagaaattgctgatggtacagaacttggtaagatggctgctgatatcatcaatcgaggagagttattgtcagatgagtttgtcgtgcggttaattgaaaatagtatagcaacacataagggtgctaatggttttctgtttgatggtttccctcgtacagtggctcaagctgaaatattagataatatgttaggaaaagaagggacacctttgaaaggattaatttgcattgatgtaccttttacagaattgaagcgtagaatgcttgagagagctaaaatcgaaggtcgtgctgatgataacgaggaagtgattgaaaatcgtttcaaggaatacaatagcaagactgtgcatgtagcaaattattataaaaataagggtttgcatatagatattgaaggagatagaactatggatgaggtgttcgcttcaatagtagaggtcttggagaaaataaaagattaaataatatttatctgtttaagatataaaaaaatagagattggatagccaatctctattttttatgggagttattttatcagtccttttcggcgaagtaaaggttctgtgctgggttcttgaccacggaattgtttgtacagcttcataggatcgtctgagccacctttggaaagaacgttttctcggaaaagacgtgctttttcaggattgaatatatctccggtttctttgaatgctgcaaatgcatctgcatcgaggacttctgcccacgtgtaagtatagtatccagcagaatatccaccattgaagatatgaccgaaataaggactgcggtagcgaacggtgatttctggaatcaagcctaggtgttctagggtctctttttcaaatttctcagcatcaattggtgttgtttcttttacagaatgataagccatatctaataaggctgcagacatgaattctactacagtaaatccttggttgaacagactgcttgcttgtaatttgtcaattaattcttgtggcattggctctccggttttccaatggcgtgcataaactttcaatacttcaggtgctgctgcccagttttccattatctgtgaaggtagttcaacaaagtcattggcaactgaagttccggctacacttggataggtacatttagaaagtaggccgtggagggcatgcccaaattcatggaataaagtgcaggcttcatcaaaagtcagaagagatggagtgtctcccgtcggtttggtaaaattacatacattggtgatgaccggtgtagagtttaataatcctgcctgtgggcggaatgcttccatccatgctccactacctttacttgcgcgtggaaaatagtctgcatataaaataccaatatggctaccatcggcatcttttacttcaaaagcgattgcatccggatgaggtaatggaagattatctaattgtgtaaatgttataccatacaatttatttgcaacatagaatgcaccttcgcgcactttttccaatgggaaatactgactgatttctgtttggtctaatccgtatttttctttcttcagtttttcactgtaatagcgccagtcccaaggagcaagtttgaatttacctccttctctgttaatcattttttgtaattctgcagcttctgcttttgcatttggcaatgcagcttcccagatttgattgcataatttatagacattatcagttgtttttgccatattgttgtcaataacatagctggcatagtctgggaaacccaataagtgtgctttttctgctctgagggaaaccattttgctgatattatcccagttgttattagcattcttattgcttccgcgattaatatatgctttataaatctgttcgcgaagatcacggttgtctgcatattgtaagaatggcataatgctagggttatggagtgtaaacacccatttaccttccattccggcttctttagcagcatctgctgctgctgcaacaacgccttctggtagaccagataaatcttttttattatcaataaccaatttatatgcattggtctcttttaattggttatctccgaattttaaactaagtactgctagttcactgttgatggcttttagccgttctttcttttctggtgaaagattagcacctccgcgtacaaatgaattatagtagtgtttcaataccatttgttgttcagtggttagctgatctttctctggcgagttgaatactgtttttacacgttcaaataacttatcgtttaaatacattgcatctgtatttgcagatagttgtggtgctatttcttcagctattgcatttaacgaatcagtagtgtttgcttgttgcaaattgctgaagattaaactaacttgtctgagtgtttgccctgatttttctagagcttcaattgtattggcaaatgtaggggcttccggattattgataatagcctctatttctgcctgctgttgtttaataccttcatggaaggctggcaaatagtgtgcgtcctttatcttgtcaaaaggtggcacttcgaaaggtgtgttaaattttgtaagtaacggattgtctgatacagacttttcattgcaggattgcataagaatacctgcaaaacaaattaaataagcgattcttttcatatatatgttttttgtttgttgacaaatgtatgaaaatatattaagaatgatatgttaaattttaaattttcattattaatttcttgttaatataaggggtttttcgtaaatttgatggtgaaaataataatagtcatcagcagaataaatataaaggtcatgaaatcaagaatgaatcaattagtaattcaggttctgttaatggttatcataacagtaatcgtagcctatacttgtgttagtttagcagaattggtaggtgagttttcagaagctgcattcaatgtattatcaagaatgaatagccattattagtgttgtaattgaaaatgcattctgttaaagcaaagtatagcatgtctatttcaggataatgagatagacggaatatcagtgtttgaaaatcatgaatttcatttgtctctgctcttaccttttcgtatctttgcttgcacttcttgttgaatacgggaagtaattaatctgtagaaatttaatatttttatgaacacaaaattttatttatcggtagtagctctcgctttggcagttatggcttgtaatggcaaaaaaaacaatcaattatcgggaggtattgacgtatccaatttggataaaacagttactccaagtgcagatttttatcaatatgcttgcggcggttggatgaaagcacatcctttaacggatgagtatgggcgttttggctcaatggatttattgcgtgaaaacaataatactcaaatgcggggtttgattgaaggagtagcaagtcagcagtttgaaactggaagtgtcggtcaaaaaataggcgacttgtataaaatggcaatggatagcaccaaattaaatagggaaggtgttgctcctatacagcctttgcttgatcgcataaaagctgttaaaaataatgcagaattgcctgtattggttgctcaaatgactagagaaggtttatcgccttatttttcagtatttgtgagtgcagatgatatgaatagtagcatgaatatagttcagacctatcagggtggtttaggcttgggaaatcgtgactattatttagctcaagatgaaaacaatgcaaatattcgtgcaaaatacgaagaacatgtggtgaaaatgttccaactggcaggatgggaagaaaaagaggctaaaaaagcagctgctgatgttatgaaagtagaaacaaagttggccgaagcttcttatgatatgatcaagatgcgcgatccgcatgctaattatcataagatgactatagatgagctgaaaaagcaaatttcaggaattgattgggatatctattttaatactttaggcttaagaggcttgacagaattaaatgttggacagccagaacagttacaggaagtggcacagcagatttcccaaggtaagcttgatgagcagaaatcttatttgcaatggaaggtgattgatgctgcagcagcttatttgagtgatgattttgttgtagaggattttgagttcaatggtaaagtaatctctggaaccaaagagatgaaacctcgttggaaacgagcagtagcaacagtggatggagcaatgggagaagcagtagggcagatgtatgttgaaaaatatttcccggcagcagcaaaagagcgtatggtgaaattagtcggaaatttgcagaaagcgttaggtgaaagaattcagaaattaacatggatgagtgatgagacaaaacaaaaggcccaagagaaattggatgccatttatgtgaaagtgggttatcctgatacatggcgtgattattctggattagagattaaaaatgatacctattgggataatattttgcgttccaatatatttgattatgattatatgttggcaaaagctggtaaaccggtagataaaaaagagtggttgatgacacctcaaacagtcaatgcttattataacccgacaacaaatgaaatttgcttccctgcaggtattctgcaatatccgtttttcgacatgagcgctgatgatgctttcaattatggagcaatcggcgttgttattggtcatgaaatgactcatggttttgatgaccaaggtcgtttgtatgacaaagatggaaatttaaaagaatggtggactgcagaagatgctaagaattttgaagaacgggcacaagtattggttgattggtttgataaaatagaggtattgccaggattgaatgcaaatggtaaattgactttaggtgaaaatatcgctgattatggtggtttgcagattgcattccaagcatttcataatgctacaaaagatgctccattaggagaagttgacggctttaccccagagcaacgtttttatttgtcatatgcaaatgtctgggctggtaatatccgtgatgaacaaattcgttatttgacacaaatggatgtccattcattgggacgttggagagtaaatggtacattgccacacattgatggttggaacgaagcatttagtgtaaaagaaggagatcctatgtacttggcaccggaaaaaagagctgaaatatggtaggatggaaggagaattgataaatttattgataataatggcggtctaataagccgccattattgtttagttctaattaaaatacatgattaagatcatgatttttatttcatgcaggtataaggggtgtcatctaaactaagggctgatgtgataatttgaaatcggattgtaaaaaatcgcataattagcgagcgtagcgcttgaggtatacagaggcgctagttactcctaattctacagcttttcgccaatctttgattgcttcagcccgtttgcctattttgaagagagcaatgcctcgattggcatatatagctccattctcctgattaagtttaagggcgtaattatagtcggcaatagcttgggtatataagttctgttttaaatagcaactggctcgattttgataataagcgtatactaattcaaagtcttcgccattttgttttgaatatttgatggcatttgaatattcttgaatcgctttggataaattgttttcattttggtagatgtttccaaggtaataacacaactcatcatcctctttaaaaatttctttagctttgataaggtgtgattttaaaatagagacctgattagtgtatgaacatgcggtatttagagacatatatgcttcccgttgattaggattcaagcggattgaggcaattaatttttgcacagcggtttcatagttgccctcttcaatatcatgattggcatcattgagtaattcgatggggcgattgattgctgctaagtctgtttgaccgaatgttgttgtgcatacgcttgctacaagagataaaatgagtccgaattttttcattgctagttgttattagtagtgttattttttttgtttgtttttcccaaaagcaaatatagatatttttaatacaatgcaaaaattttgcattaaaatgcaattaattcaagccgaaatttaacatataacatccaaatttgtttgattgggatgtataaaaaatcccgatgaatctttccatcgggatttttattgcaatagttatattgtttagttgtgttgtgtcgtatggctatcaggacatgctgttagaggatgaccgcttccaatgtaaaatgtaggtgacgtggtaggaatggtttctcctttcgtatccttgataacaacttctggagcagtggagcagcaattataaattagacttagttgtgggtctgagatgaatccaatataactgccgatgaagatgttttgattctccgaagcttccgttatgactgacacattgcctgcattgaggcattggtgcactttacaagagcatggatctatttttccgattaaacctcctgtgttggaatctgtttggctattggcatttccgataacttcgccatggttgatacaaccattgagtgtcgtttcataattatacttcatgatgtaaccaatgattcctccggtagaattgcgatgttcactaggttgtgcctgtattgttccgtagttattgcaatgagtgacttgggtactggttgcattcccgataattcctcctaagttgcaatcaggctgttggctgatataagtagagtatgaacttccgtatatttctccgtagttatcgcattcctctattttattttttgaggaattgctatttgtttttccaattatgccaccaatgctggtactatatctcccttcctgtttgccacctgttatttttgcgtagttattgcattgcaaaatggtaatatcacttattgcttttgcagctatacctcccaaatggatatcatttttttgggaaattgaactttgtgtaatgctgccatgggtgctacattggttgatttgacagcttgaaccggcattggcaacaatccctccaatgctaatgggtgcgctagtagatgaattgacattgatatttccattgtagtggcaattggttatagtggtatttgtagcctgggctatgattcctccaatatttgtacaagattcgttggttatattaatttgggaattcagattggatatttgggcattatttgttttaccaaacagacccatgtccaggtttgagcttgtttttaaatctcctttaatagtatgcctgtagccattgaaattaccattaaatgaagttttgccaataggagtccacgttgttccttcttgtattgttatatctgtttttaatgaaaagtatttgtttgtataagtgtctgtttgttctataagatatttaaggttttctgcattttcaatgatataaggatcttctagagtaccagtcccggcaaatttttcagcagtagtttccgcactgaatatactgtttttggtctcttcccattctgaaataggaataacatagctaatcccttcgttgttctcatcagcttgtacgctggaaatcgcttgttgggctgtcagatgacaggtgtgtgtactaccgtcctgaagggtcagtgtcaccattatcttttgttctgccggaatattgcaattgcatatcaagtaggctttaaacgttggtgtcgttgtcgtacattcctgaaaattcagagttagcgatgatgttttggtctggttgcaattttcaaacagtccgccttctgtagtaggagtatcgttattatctaaagttgttaatgtaaagcttttgggtacagattgagcagatttaggcatggtaatatcaaaacagaatatcaagcccaggtgcataaattgcagtggctgttcaaggttatcaatagatggtgtcatcagatagtcaaaagcagccaggtgttcagtgttatcatatcctttttgcacttgtccttgataggttgcgttttgtttccatgtttccggagtggtgccttcaatgcttgcagggtagaaggcttgatattttaaatttgatgaaccgggtatatctggaaaattatttccttcaaattcagcaatttgtgctccggatccatttttcaacaataaatcgacagatgtatatgtggctgcatttgactgcatgacacgtattttgtcattttcagcccatgctacatgtatgccattttcgttgggtgtaagtgttgtttttgttgtaggcatcccggttgttgtataggttgccgttacggttagttggtccgttgtattgcgtaattctacttcttcggagacacaagctgtcatggaaatgagtagagctgaaattaatgttataaaattatatttcatatgtctgctattttgaaaatggattgttttggttattgaagtcggatagagtactctctttatctgaaggtgtaagtggatgttcctgatcaggttgccattctgaatcaattgtgattgttatatcagtttttccacttgcagcagaggtttgtttaatgatagaaccttttgcgttggtccgtttgttgcgtaacattggaattgtatttcccggcaaagtaaaagtatttaaacaaaacaatgggtcattggattcaaacttcagagtgatagggctgagataattagaattacctgtgggagcaaaaatataatcataaagtatgttggctttgtggttgtcacctgatgttggtagagtctctacagatgcttggatatctaaagtcgtatgtcctagggtgcttgttgcaacattaaatgtttcagggactttgtacgaataattcattgtctttaccttttcaagtagagcattgtctttttcaatgagattgagttgtccgaaggggcggtttaatgtcaatgtctgcttgcattctaatgccgatttagtaatagtctggcatacacagaaagcgtcacgacttgcatcattgataatatagttttctcgaatgattgttatttcctttaatccgtttggcgtatccgtttggtaatacaagtctgcatagtgtgtgtaggtattaggttccgtttcttctgttgtttcgggtgattctttaatataatccgcccataccagtacgtcatattctcccggattttcgagattgaatgaaaaaaccatatcttgagattcttgcattttttcttctcgatagattatttgctcttgttgccatacctccaagacaaagcgcattatatagccaggtaatgttgggggtgtcgcacgggtgtataggccgtgattgatatttgttccgattgtaacacggttgttctcttttaagtcattcgtgttgtactcatcattgttgcaagctgttactacacagatgaaagtcatcatcaaaatgtaaaaaaaatttttcttcataatttaaattttaataggttaatatattatcaatgtcgatattgatttcgtcatcaaattctgtatttatttcaattcctcccggtttccttttagtaaggaagttgcccattattcgagttgaatatccctgtttataaggtatattgattggcgatgttgtgattatttctttattgttttcgtctttgacagtgaggacgagcattgctgtgtttattgttgtatcagctaatatatagtcaaatccaagcttacactctttttgcttgttgtcggtgatattcaaaggtaactcaaaggatacattgctccaggaatctttgacgatgccttcataggcatcaaacaccatgggataaaagaatagatatgtaaatgagatacgatactttttgtcggagagccaagatgtttgttttataaattcctctacatcagtagtgatgatttcgtatctggctacaggcgggcaaattgtaatattggtttcagcatgtatattttcttgatttcgatattctcttaaatcgatggttttatgtccatagagacattctttagaggtggtattgccacaatagggttcaatacaagtaatattgtttagattttcagaaatatagtgcagatctgagtcatcttctgtataatccatccatacagacaagtcgtatttcaaggtattcaactctaactttgttgataaaaataaagagtcgttggtagacgaaagtgagtcaaggaaaatcgtttgccgagtaataatcgtgttgttttgacatacttctatgtgaaaacgtttgcgataccgcttactaatattagtgatttgcggtgaattttgttctaatgtacgaaaagttggctttaaaataatattgagtgttaatgtaataggcgaggagttggtctcctcgtagtcatccgattcttttgaatgcctatgtgcacagctaaacataattatgcacaataccaaaatacgaacaattttagacacgtatgttttgtattcaaataatttatttacaattgcagcgaatttagtaaaataaatttaatatatgcatcatttgttagataaaaaataaaccggacataattgcccggtttattaaatacagaaaatatatctcattctttcaaccacttgtcaagccatgacttgaaagtacgttgccataggataccatcctggcagcctgttacccaatggcattcggtcgggaagtataaatattgtgccggaatgcctcgcatgcgtgcggcattgaaggctgccataccctgtgaagcatcgatacggaagtctttctgtccgtggatgaccaggataggggtatcccagtttcctacaaacaagtccggtgaattggcaaaagtgcgttgtgccactttgttgtttttctgccaaggtgcaccgcccatatcccaattggcaaaccacatttcttctgttgtgaaatattgcattttcaggtcaaagattccgcagtgtgcaatgaatgccttgaagcgtttgttgtgatggccggctaaataataaacagagtagcctccatacgatgcacctacacagcccaaacggttttcgtcgatataaggctcttttttggcatcatcaattgcagagaagtagtctttgatattctgtcctgaataatctccgctgatttgttccagccattccatgccgaatcccggtagaccacgacggttgggggcaacaataacatagccgtttgcagccatttgctggaaattccaacgatagctccatgattggctgattgtattttgaggacctcccgtgcaatataatatggctggatattttttgttggcatcgaaatgaggaggataaatcatccacaccaacatatccttgttgtctgtagtctttacccaacgcttttcaactttacccatggtcagttggtcaagaaggtttttgttgatgaatgacaactgttcgtcttttcctgttttagggtcaacacggaaaagttcggtaggcatactcatcgacattttagttgcatacaactgctctccgacagggataacagaggtgtagttgtgtataccatcagtatgtttcgtgatttttccgcttgttatgtccaaagagtaaatttcgtcagtggcgtgccagtcggaaataaaccagatggtattgtcattgctccatctcagaccctctgcattttgctcgaaattttcagaatagtctttcttttcgccggttgtcagatccattacgaaaagacggattttgtcagcttcatagccttcacgttccatgctttcccatgccatatatttgccgttaggagaaatcaccggattcttgtcgtatcccatcatgccttctgtcagattggtcgttttgccgttttcaagattgtaggcatatagatccgtattggttgattctgcatattctactccaacttttttacggctggtataaatcaactgcttactgtcttttgtccaggcaatctgttcaacgccaccccagggacggacaggtgattcccaacgttcgccttccataatgtctttgccgttggtgatttgttttcccgcagcataatctgcaatgaacaggtgtgtatagccttcaacccagtcgttccagtggcgatagaattggtcgttaatgattctggctttcgctttgggaaggtccggatgcaaatcctttacggtcggctctaactgtacatcttttaaatagacaattttagacatatccggggcatatacaaatccgttgatgccaccttcgatgttggtgatctggtgggcatggctgccgtccggttccatttcccataattgtcctttgtataagtaagcaatatgcttgccgtccggagtccagatagcttcggcttcgtttgatttggtatctgtgatttgagtcactttgccatcagccaaagtcatcacatataaatctgtatatccgcgatcctcctctttattaaaataggtaatgccatatacggcttttgtgccgtcgggagaaacactcactcctcccagtctgccgaatgaccacagcacttccggagtcatgacgtctgactccaattttaaatcggcaggagtcttgtatccttttccttctccggcttctgttgttttattttcgttacatgccatcatggatagcacacacaatattggtaataacgtttttttcataacactttaatcttcactttctgttggttctgccgccatattgttttcttcggttgtaccattgagcgcgttgacaattttctgtttcaattcttctgccaattccggattatccataatcaactgtttgacagtctcacgtccttggcctaatttgttttctccgtacgagaaccagcttccgcttttcttgatgatattgcattctacaccgaggtctacaatttctccagatatggatataccttcgccatacatgatgtcgaattctgcttttcggaatggaggtgccactttgtttttcaccaccttaactcgggtatggttacccaaaatttcttcaccgtctttgataggaccgattttgcggatatccagacgtacagatgcgtagaatttcaacgcattacctccggtggtggtttccggattaccgaacatgactccgattttgtcacgcaactggttgataaagatacagcatgtatttgttttgctgattgtactggtgagtttacgcaatgcctgcgacatcagtcgggcctgaagacccatgacactgtctcccatattgccctcgatttcagctttgggggtcagtgcggcaacagagtcgatgacaatgatgtcaatggctgcagaacgaatcaattggtctgcaatttccaatgcctgctcgccattgtccggctgagagatgaacaagttttcaatatccactcctaattttgctgcataggtacggtcaaaggcatgctcggcatcaatgatggctgctataccgccttgtttctgggcctcagctattgcatgtatagccagggtggtcttaccggacgactcaggtccatagatttctatcacgcggcctttgggataaccgccaacacccaatgccttatccaaggctattgagcctgatgagattaccggaatcttctccacatggttgtcaccaagtttcataatacttcctttgccaaaatttttttcgattttgtccaaagtcagttggagagctttcagtttctctagatttttttctttatctgccatattatttaattgaattaattatttcattattcggccattgcagtcaaaagctgttctgctgcggctttggtattcactttcgtgattactttgatgattgtaccttcttcgttgatgacaaatgtggtgcgcaatacacccatatatttgcgtccgtacatcgatttttcagcccacactccgtatgcttcgagtgttgttttttcagtgtcggcaatcagattgaaagccaggttatatttcgctatgaatttttgatgtgaagccacactgtcggggctgactccaatcacttcgtaaccttttgcagtcaatgtatcataattctcgttcagactgcatgcttcagctgtacagccggaagtattgtctttcggataaaaatagaggataactttcttccctttgaaatcatccaagcttatttcttggccattctgattcagacctttgaaaaaaggtgctttatcgccttcttttaatggtgtcatagtgtttattataagtttttctatatagacaaatgtagggatattttataaataaagttctatctttggaggaataattttagagataatcaaagaggaagattcatggaagaatacttacaacaactgacagagttttgtcgcaatacgttggttgacaatttagggatggagttcattgctgtcggcgagggatggctggatgtgaaaatgccgattgaccgcaggacttgccgtccggacggcgctttgcatggaggcgccaatatggcattggccgaaacggtaggtggggctctgagctctatgtctgtccccaaagaacagcgttttaatgtctttggaatagaagtgaacggaaaccacatgaaacaggccaaaggtgcgtatgtcattgcgcatggaagatttattcaccaaggtaagcgtacccatgtcgttgaggtggaaatacatgacgaacaggggactttggttacagtgaaccgggtgaccaatgtgattgtataaaaaaaggggcttaagccccttttttaatgtttgtcaatggaatagccccattgtttgagagcaaaatcccaatgcttttctacgagttccactgttcgcggttcgtatttataagcgtttttcttgtagccctttttcttgtcgagataggcagaaatatctgcttttgcctcttcaaatccgggaatattcagtgttttatagattttctctgtcatttccatggcattgctttcgaaatcctcaaacttgatttcaatcagattgccttccggaatcaacgacttttcttcctcataccggtggtacaggcggctgtacacttccaatatattagactccatttgttcaggagtaatcttttgcagctgcaacggaataatcgtattgttgaagaaactgcgtgtagattcaaacactgtatacggattcctcatcaaatagatgaacttcgcattggggaacatttccagtatttcccgaattcttccggtatgtggaggattcttggaaaggaattgtgtcccttgggtattccataatgagattttcatcatctttatgaatgtctctttaaaaatgcgtctttcttcctcagtcgctttttccatcgtcagataccggtcgcaataatccatcatgttctggggtaaataccagaaattgtaataggagtagggcatcatgttggaaagagcgaactcttcttcctgaggcaggtcgacattcagctccatattgtcagtcggtcgtttgtccggcatcagccaagccatagtcttcttgaaaaaaggctggccccacatcatgatatgcggaaacactgtctgatacgtcgtagtgtagccgaagtgtttgtcatgggcaagcacattatgtacaaaggttgttccgcttcgccagtgtcccaaaatgaaaaccggctccatattcatggccatatccttcagtcgtttgttataccggcggtcttggatattgtgcagcggactgagcagccagcatacgcttttcgtcaggcaatatttggttttgtagcctttttctattttctgtcctttggtgatttccttaaatgttttccagtctgctccgaccagagtattgaccggtaatttttgaaattcaagtaggcccatgatattaatctttaatcaattttaccgcaacaccctgcttgtccaattctctcaccactttttcaattgcttcaaaatgctcttcaccgatacccagttttgcgaggtgtatttccggaacatccatttcttgaatgtctttcatatccaccttgtcaataatcatacccacagcacaggtgttgttggtaatggggtcaatcaggataaaggctcccgtgcttttattctttttatacggatcaaaaaagagcggttttccggtgctcaggacaacccgtgcaatttcattcagctctaaagcctcgctgggagattgctccatggtgttgacattcaccttatatcggattttgtcaatttttacacgagccagattggtcgtttgtttgataaagaactgttcttccgggttcattcgtttttcgtccatccataccagcatggcttcgaaattccgcgacatgataggcagattgtccggatgtaccagcatttcccctctggagatatcaatttcgtcttccagggtcagggttacagcctgaggagggaatgcaaaatcctgctcgccgtcataagtcacgattgattttacgcgcgaccgtttcatagaaggaagggcaacaacctcatctcctttgcgtacgatgccggaagccacggtgctgctgaatccgcggaaatccagattcggacgcaacacatactgcaccgggtagcggaaatcctcaaaattcttgtcgctgccgatatgtacggtttcgatatgttccaatagcggtttgccggaataccatttcatgttttcagaaccttcaaccacattgtctcccttcaatgccgaaagggggatacaggtgatgtccggaatatccagcggttctgcaaaagagcggtattcattggcaatcttgttgaacacctcctggctgtattccaccaagtccattttattaacggcaagcaccacgtgtttgatacccaacagagacaccagataagtgtgccgtcttgtttgtgtaatcacaccggtacgtgcatccaccagaatgatggccaggttggcagtcgagccaccggtaatcatattacgggtgtactgttcgtgtcccggagtgtcggcaatgataaatttacgtttgttggttgagaaatagcggtatgccacgtcaatcgtaataccctgttcccgttcggctttcaaaccgtccagcaaaagcgcatagtcgatattgtcaccggcattgccgtaacgtttcgtgtctctctcaagggcatccagctggtcttcataaagttttttactgtcgaacagcaaacgtccgatcaacgttgattttccgtcatctacagagcctgccgtcagtaatcgcaacaagtcttttctctcgtcttgatccaaaaactcttttatatttaatttttccatttgtttctcgtaattcgttaatcgttccttatccttaaaaatagccctctcttttcttctgctccatgctggcatcctggtcgaagtcaatcacgcgtgtcgtacgttccgacttggtggtagtcatcatttcctccacaatcttttcaatggtgtcggcttctgattctacggcacctgtcagcggccagcagcccaatgtacggaaacgcactttgcgcatctggattttatcgcggtattgttccggcagacggtcgtcatcgggcataatcaagttgccgtcgatttccacaatcggtcgttctttagcgaaatagagaggaacgattggaatattttccatgcggatatactgccagatatccaattcggtccagttggacaacgggaaaacacggatagattcgcctttgtggatgcgtgcattatacaggttccataattcaggacgctggttcttgggatcccattggtggaatttgtcacggaacgagtagattctttctttggcgcgtgatttctcctcatcgcggcgtgcaccgccgaaggctgcgtcaaatttatatttatccaaagcctgcaacaaagcctgtgttttcatcaggtctgtgtgcactttactgccgtgtgtaaatggtcctacaccttcgttgaaggctttcatattcgattctacaatcaaatcccaattgttttcccgggcatagcggtcgcggaattcaatcatttccttaaatttccacttcgagtcaatgtgcatcaatgggaaaggcacctttcccggagcaaaggctttttcagccagccgtaccatgacggacgaatccttgccgatggaatacagcatcaccggattttcgaattctgccaccacctcacggatgatgtgtatggattctgcttccagctcttttaaatggcttaacttgtattctgacatgatatataattttttttagttgctaggttattgatttattattgaatacggggcaggatagcgtccatcagggctttgacagatgcttccagcggttgtttggaagtatcgatagaaacaaaggcatctttcggctcttcaaaaggagaggagatacctgtaaaatctttaatttcaccccgacgggctttggcatacagcccctttacatcccgtttttcgcattcctcgatgggggtgcttacatatacttccagaaaatcctctcgtccgataatattggcagccatggtgcgaatggcgttggtcgggctgataaatgcagcaatggtcacaattccgcaatccacaaacaatttggacacctctgcaatgcgccggatgttttcagtacggtcggcctccgagaagctcaggttattgttgatgccacttctgatattgtctccgtccaaaatgcggcacaagatgccttttttgtataattctctttccagggcgatagccagagtgctcttgccggagccggacaaaccagtaaaccatatcattgttccgcgctgcttcaacaaagactcccggtcttctctttgcaacatcttgtcgaaaatcggataaatattttccgccatattcttcattaatcttttaatcgttttcttcctttttgctttagtcaatctttgttctcacgatgaaccacggattcaataaatcctctttgttatacctcaaaggcgtggtttcgtcaatctggtacacctccttgccggcagctctgacaattgcatgtccggcagcagtatcccattccattgtaggagcgaagcgcggataaatatcggcggagccttctgcaaccagacaaatctttatcgaactcccgatcgaagtgaggctcacttcgccgtgctgttcttttaaagaattgatatacgattcggtttcggcactcatgtgcgacctggaagctaccacaatgtatttcccgtcttttctctccaatggtaattttattgaacgattctcaattacagcaaaatctgcgccattttttgcatctacattgtccatacggtaggcacccccttgtaatgtaccgtaatacagcactcttttttccggtatgtagatgactcccaacgccgggcgtccctcgtataccagggctatatttaccgtaaattcgccattgcgtttgataaattctttcgttccgtccagcgggtcgaccacccataccgttttccattctttgcggatggcatagtccatattcttgcattcttcgctgataatggggtatggagtctgtttcagatgattgataatcacttcgcttgattttctgtcggcaatcgtcaacggagaattgtcagctttcttttccacttcaaagtctgaagccgggtcatgatatatttctgaaatgacattgccggcttccaaggctgccttgatggctgttttcaacaatgattgattgttcatttgcaaaaaaatttaatgactgcaaaggtatcaattttttttcattctctgcacttcctcgaaacagcctttcttccttttctctccctctttactctctcattgctccctctcaaatatatgtcatctatatatcaaagataacataactataagacaaagataacagattgatatctttgattagtatttgacatctgtttgtgtacggattgagaataggggaaaagaggcgattcatgctgttgagtgagcatgaaggtaaaaaacacctattgcgtctagatgatttctttttttttgccgaatattttatcaaataaaaaaaagtaattttgtgtaatgaagcatttggtagttataacattctattttgtatgtatcattatggggtgcacagcccacaatgatatatattcgtatgtcaaagaacaggttgaaacgtcaggtaatcaaatatctttcaataaattttctgaagaaaatggatttgagtgggacacattatattttttttctgcaaaagcatctttagaagagattaataaaactcttcctgttaaggttaatgattttgttgatgtgggagatagaatttattttctcaaaaataagcaaatcatatattcagaatgttggtattctgttgagtttaataaggcaaaggggataagtattagtgcatccgatacaatattgaaatgcaccccaatggatgctatttttaatattgaaaagaaaaatgatttctttattttaacgcctcaataatatattatactcattggccggattaaatatgcgctattttaattctgccagcggctttttagtataaaacatggaatcattgaacgaaaaaacagtcaattctgttttttttgtttgccgacttacttaatcgaataagcttttacatggaagtttttttaaacatggtaattatataatcccgataaaataaaggcagacactattagccagcatttgggcatctcgcaaaactatttggagtgctattttaaaaagcatacaaatgaaactatgcaacaatacatcatcaaatataagttgaagttgttagaaaacagattattgcatagcgaaataagaatcaataagattgctgctgaattaggctttacagatgaaagccacttaaacaaactattcaaaaaaatataaaggtgtcatatcctcagaatttaggaaaaggaatttatgacaactattttgttttcactgatttatccgtaaatttgcattgttaagataaaattcatgctaaatacagaaaatatgcaatcacttattgatagcggagaaggctacaatgtagaatttaaggttcgtgttccttcaaaggtgcgtgaactgacagaggaaatatgtgctttcgccaatgcagacggaggatatttgcttattggagtagatgataacgggcaagtggcagatactaacttagaaaacgataagcgttccgcaattcaaggttctatcagcgaaatatctcctgtactccactgtgaattgtatcctgcaaatgttggcgataaaactgtttgggtgattgatgttccgcccggcaaggataaaccttatatattttccggttctatttatgtccgtgagggggcaaactcacagaagcttcgcacagctgaagaaatgcgcagcttttttcaggagtgtaacaaaatctttttcgaccatataccctgccattggttcaatatctacacagatgcagacgaacagatgattaaggatttccgaacagaagccaaactaaatccatccacatccgataaacaaatatttgagaacttggaaatctgcccgaaccggaattccatacagaggggatgtttacggcagtgttcaaacgtcaaatctttaactctgctaactatgacacagtaaatggcagagtaaatgacatagtaaatgatactataaacgagaatgaaaaagccattcttaatctgctggtaattactcccggcttaaatgcttctgaaatcagtaggcatattaacaaaagcttaagaacgactatgcgatatatcaagattttacaagacaaaggtttgatagaatttaaaggcgcacccaaaactggaggatattatctattaatttaatggatatttatggaacaattttttttagaatcaaatttttttacaaactattataatgacaataactgtttgtgttacggctcttatctattggcataataaggtggagaattgtgacgtaaagtttggtgtgataggagaaatgcattatttttgcactcttgatgttatgtaaagatgttgagtaatgacaggagagtcacgaacttctaaaagtataaaaaacgccaaagttgctttggctttttattttataaatttagtccttcagtttttgtctcgtaaggtgtttttggattatctgggtgcggaggttttgggtttgaatacaactgcccaaaatttgttgggctttttgaatttggcagaattaggagtcagttttgcaatttcttatacattatatgcacctctattaagaaaagacgagcagacaattaatgagattgtttcgttgcaaggatggctgtatcacaggattgcatatataataatctgtggtgcagtggtgttgatgtgccttttcccttggatgtttgctaaagcagatgtcccattctggtatgcgtatgctaccttcactgtgttgctttgtagctctttgttcggttatttctggaattaccgacagatagtattgactgctgaccaacaggaatataaagtgacgttcaatattgagggttgtaagttattgaagattgctttgcagttggtgttgatagcttatttaccgtatggatatatcagttggttggtgttagagtttttggctgcggtggtgacggtaaggttggtaaaccggttattgaaaagaacgtatccatggttgaagacggatatcagcaggggaggggagttaaagttgcgttatccacagataatggcgaaaacaaagcagctcttttttcataagattggtgggtttgttctgacacagacgagtcctttgattgtttacgcattctcttcgttgacattggtggctatttatggtaattatttgttgttgatagcaggtatttctcgttttttggacgctgtatttaatagtattggtgctggagttggtaatttagtatccgaaggggataaaaagaaaatatggggcgtttttctggaattattctcttctcgttttcttttggttagtactgcctgttatagcgtttatatattgacatcggattttattactttatgggtgggagaacaatatttgttggataatattaccttgttgctgttgatagcgattatgtatgttaatttgatgagaacggtggtagatgtttttatcaatgcttatggattgtttcaagatgtgtgggcaacacttactgaagcgggattgaatgtgggaatgtcagttcttttgggctatttttacggtttgcatggtattttgtgtggggttttgcttagtctgattttaatcatttttatgtggaaaccttattttttgtttcgtgatgggatgaaaatgtctatcactaagtatataggcgtttattgccgttgtctgtgtataggggtggtgacttgggcatgtgtagattgggtacggccggatatagaggtagagggctggttggattggggggtagcagcagtcgtgactgccggtttattttttgtttttgaattattgctgctatgttgttttgataaaagtatgcgatgttttattcaacgctttttaaaactgttttgatatggaggtgaatcctaaggtgtctgtaatcgtaccggtttataaggtagaaaaatttattgagcgttgtgtacgttcattgttggagcagacgatagaggatatagagtatatttttgtcgatgactgtagtccggatgcaagtgtggaaatattagagcgtgtaataaaggattatccggagagagcagagtgtatacatatcatccgtcagccggtcaatcggggagtggcagaagctcgttatagggggatggttgaggcgaaaggcgaatatgtggcgatgtgtgatagcgatgattgggtggaaaaggatatgtacgaaaaaatgtacagtaaagcccaagaaatggatgcagatatggtagggtgtgatttttatgaggagtattccgatcatagggtttatatttcccagtcatttgatttgcctcaggaagaatgcatcgaaaaaatgttgtatgcttctattggtggacatttgtggaggagacttgttaaaaaagagattttggatcagtgtggtttgcagttgttgtcgggggtgaatatgtgggaagatttggtaatcagtataaaaatgcaccattttgctaaaaaagtgggttatgtaaatgagggattatatcattatgtgcagtataataccggttctttggtccatgcagtcagcagtaggcagtttgagagcatacagatggcttgcgggctgatggagtcttttttgaaagagcagggtgtttttgaaaagtatcgtcttgcgttttatgagcgagcgtttattgctaaattgaatctggtttttgtaccggctttgcgtgattatcagatgtggcaaacatattatccggaatcgaacaagtacattcggcattatcatataggtattcataataaggtactttttactttgttgacctggagattatattgttgtgttaatttgcttttaggtatgaaaaagttattcctaaaaaagtaaattagaaagctttgtttgggtatgtgtcaaaatctatctatttttgctttttgtttatcataaagatgtgtcaatgctgagcggatattattagcaaatgacttttgttggtatgatttctgaaaatatggttggtgtatataaaagtcaaggtatatggattttgaaagtggtcttatttataatgtgtttataattatcgcttgtggattggcttattggaccgagcggtctgggtatcgtccgttgaggctgttgttgacctatgcttttgttgtggtattttgggcagtccgttataaaattgggtatgattatgttgggtatatgaccattttcaaagacgtaagatatggtctgtcttcgtacgtagagcctggctattgggctttgaataagcttttctcttggtctccgattggctatgtaggtgtgatttttgtaatgacagcgttaagctatttctttttatttaagctatttgtccgtgagaggattctgactttggggctttttttttccatggcattttatttgcagtttatgttgacaaaccaagttcgacaggcttttgtactagtctatttcctgtctgttgtgcattatttggaagagagtaaatattggaaatacatactctctctgttgccgatgcttttattccatacatcggttgtttttttgtttcctttggtgtttgtgacaaaattgcgattgtctaaaatcacttgggcaatattgatgttaggaacgtacattatgtatctgtccggctgtttccgtgaagtgggaacaaaattattgatggttttaccgatttatgaccgatataaattcacctcttatatggctgcggaagatgtgggtttttcaattgttatgttgtttgaactttgcgttgctctgtttattctgttcttttcggatacggtcaatcgtccagtgttactgactatctatttgttgggaattgtattttacaatgtatttgttgagtatcatttaataggaagggttgttttttatttgacctatttgaatattattttggcttcagttctgataaagaaagacggacataatggagttctcttgtttggagtaacttggtttgtcatgattctattattgggcaaggagcctacgcgacatggaaatcttccgtatcagacaatttttgagcatccactagataagtattagtattatgaagataatatattgtaccaatagcacttttaattccggagggatggaaaaaattctgatgtataaagcgaattatttggctgatgtgttggggtatgaagtgtgtgttgtcacgacagaacagcaggagaagaccaattttttcaagttttccgataaaatcagatttatagatttggggattaattatgatgcagataaagataagaatattttgcttcggctgttgttaaagcgcttgaaacaaaggcaccatcggaaattgatgacggaattgcttaaacgtgagagtccggatatctgcatatccatgttttgtcgggaaatggatttcttggcaaaaattaaagacggaagtcggaaagttttggagtttcatttttcgaaaaatatgaagctgatagaggctaagaacaagttgatgtattatgcccaaaagctgcgtatatggagttggaggtgggcgatccgtaaatatgacgcatttgttgtattgacagaagaggataagcaagcatggggtgagtggaagaatattcgggtgattccgaatctgttgaccgaatatcctgagcaaaaagctactctgacagctaagcgtgttattagtgtggggcgtattagttatcagaaagggtttgattatttggtggatgtatggaaaattgtgcatgaatcatatcctgattgggtgttgtctatttttgggaatggtgagaaaggggagagattgcaattggaaaatagaattcgtgaatatggtttggacaaaacgatatcgttgaatcgtgcggtttctaatattggtgatgagtatttgaaaagctctatttatgcaatgacttctagatatgaaggtttacctatggtgttgttagaggtgatgtcatatggcttgcctatagtttcttttgcttgtccatgtggtcctaaagatgtggtagatgaagcttatggaaacttggtgccggttggagatgttgatggatttgcaagaaaaataatggagtggatggatgatgtagaaaaacgcaaactagcaggagtggaggctcgtgaggctgctaaaaaatatatgcagcaagaaattatgcagatttggtgtgatttatttcaacatttggtgacaaaaaagcattgaggactatgttaactcctcaatacttttttgtataatatacttctcaaattgtttggtaacattctggagataaagcgcacgcttacatttctgataaagcaaaagatactgatgaattttgaacggaatagttttttttgaaatctaaattcgtcttttgcatatttccatcctcctcgtcttttgaacatatccggtgaaaatcggaaaaatagcaagctttcaggaatgttataaaagcgggcaccatttcttagcattctgatccataggtcgtaatcttcaaaaagcgggaagtgttggtagccgcctgctgctattacagcacttttacggaacattaccacaggatggtttataggacaacgtttttttgcaaatggatatatatcagcatggttttcaggtagttttcttgtagatatgatattgtttgggctttcttcaaattcgtcaatccaagctcctacaacatctatttccggatgattttcaaatatagctatctgtttttcaaatcttgtaggtttggctatatcgtctgtgtccatacgggctaccagttcgcatgagcaatgttttaatccttcatttaatgctttccctaagccttgatttttagataagggaatcaatttcaatatggggtattttaaggagtattcttctattacttgattaagttcattggttaatggaccatcttttactaaaataacttcggttggtaatagcgtctggttgaagatgctgtttaaactttcacgaagataagctgtttgctctttaatatatacagataaaaggacagaaaacataagtattaatcattaaataagacatgataccgactcattcttttaaccaatagttggctaaaatatagagagttttatgaaatggaattttagaaaaagccgcaaaagaaaaatgctcttttctcaattttgtaagcagttgtgaagagcgttttaaatgtcctcgtcgagttgagttggaatagaatagtaaaaacattgcatttatatcatgcttcaattcatggtaatatgctgttgtttgcagaatgttttcaataaaaaaggcggcttgtaatgtttcttgtgctaactctgtggattttatatgtgatacagaggatttgtattggatatagttgtatatagcgatgtcaactccaatgatacattgagcatgggttattaattgtataaaaatggcagcatcttcgccaactcttaaatgtgcaggtgatttaagtggtgagtcaaacaaacttttacgatatattttagcccataattcccaaccgttttttccggttaatactctttttaggtagcttttttggtctaagaaatcgaaatttacttttttgacctttttgattttatcattgacaactatattgaaaccagagactacgatatctgcttcaggatgttcagttatcttgttgataagcaattgcaaggcatccctagtcagtgtgtcatctatatctaaaaacatgatgtattcgccatttgcatgctttataccgagttctctggcttttacgaccccttcattgttcttggaaatgacttttattcttgaatctgtactagactgtttcaataaaaacttttcagagttgtctttactgccatcatttacacaaatggcttcccaataatggtaagtttgctgtcgtaaggattctaggcatttttgtatataacattctccattatatatgggtatgatgattgatactttcattatttcatttattaagtagaaagacaagattttgcaatatctttctgatctgttttttgaaagtcacatgatgtatatgacaagagaggacaaatatagatagatttttatatttctccaatcgggagtaatattctcttttttgggggggggcttttaaaatgttgctctttttttacattgaaaatattgtgggagagagaaatatttgtatctttgcgcccgatttataaaaataatgtctaacttattagataggaaacaattaaattaattatgtcagaagaacagaaagagatgcaggcagctgctgcagaaaaagctgctaagaatgttgctccggtaacaagcgcagaaccagatgaaaatttcgattgggatgcttatgcaaatgattcaattgtacctgcatctgaaaaagaagcgttaacacagaaatacgctgaaactctctctaaagtaggagaaaaagaagtagttgaaggaacagttatctctatgaacaaaagagaagttgttgttaatatcggctacaaatctgacggtattatctctttgagcgaattccgttataatcctgaattgaaagtaggtgacaaagttgaagtttacgttgaaactcaggaagacaaaaaaggtcagttgaccctttctcacaaacaagctcgtgcattacgtagctgggatcgtgtgaatgaagctttggaaaatgatgaaattattaaaggttatgttaaatgtcgtactaagggcggtatgatcgttgacgtattcggtattgaagcattcttgccgggttctcagattgatgttaagccgatccgtgactacgatgtatatgttggtaaaacaatggaattcaaagtggttaaaatcaaccaggaattcaaaaacgttgttgtatcacacaaagctcttatcgaagctgaacttgaacagcagaagaaagacattatctctaaacttgaaaaaggacaagtactggaaggtactgttaaaaatatcacttcatacggtgtattcatcgacttgggcggcgtagatggtttgatccatattaccgacttgtcttggggccgtgtaaatcatccgaacgaaatcgttcagttggatcagaaactgaatgttgttattttggatttcgatgatgagaagaaacgtatcgctttaggtttgaaacagttgactccgcatccatgggatgctctgagcgcagacttgaaagttggcgacactgtgaaaggtaaagtggttgtgatggctgattacggtgcattcgttgaaatcgctccgggtgttgaaggtttgattcacgtttctgaaatgtcatggtcacagcacttgcgttcagctcaggactttatgaaagttggtgatgaagttgaggctgttgtattgactcttgatcgtgaagaacgtaaaatgtctttgggtatcaaacagctgaaagctgatccatggcagaatatcgaagaaaaatatggtgttggaactaagcacactgctattgttcgcaatttcactaacttcggtgtatttgtagaaattgaagaaggtgttgatggattgattcacatttctgacttgtcttggactaagaaagtgaaacatccggcagaatttactcagattggtgctccgatcgaagttgtagttctggaaatcgacaaagaaaaccgtcgtttgagcttaggtcacaaacaattggaggaaaatccatgggatgttttcgaaaccatcttcactgttgattctatccacgagggtactattacagaaatctttgagaaaggtgctgttgtagctctgccttatggcgttgaaggtttcgctactccgaaacatttggtaaaagaggacggaactcaggctaaagttgaagagaaattgcagttcaaagtaattgaattcaacaaggctgctaaacgtatcatcgtttctcactctcgcgtattcgaagatgttcagaaatcagaagaaaaagcgaagaagagtgcagaagagaagtcaactaaaaaagctgttaaacaggtgaaagaaaaactggaaaaaacaactttaggtgatatcactgaattggctgctctgaaagaacagatggaaaacgctgctaagggagacaagtaattaatgaagttcgaacttacaattctagggagcggttctgccgttcccacatttaatagaaattctgccgctcaagtgcttaatgtgcttgagcggtattttcttattgactgtgctgagggaacgcagcatcagttgaggcgtttccatataccatataataagataaaccatatatttatttcgcatttacatggtgaccattattttgggttgattggtttgttatccactttgtctttgcagggacgaaaaggaacgatgcatatttacgcagatccaagattgcaggaaattattgattttcagatggaaaaaatgaacagtcgctttgggtttcctgtagtgtttcatcctttgtcaagaaaagaagaggtcatttttgaagataaagtagtgactgtaacttcttttcccttgaagcatcgttatgacgctccggtttgtgggttttgctttagagagaaagagcgtgaacggacaattcgtaaagatatggttgatgcttggaaagttcccattgcttttttacagcatttaaaaaaaggtgcagattatcttactcctgagggtgaattggtggaaaatgcttgtttgacgattgctccgcctccggctcgctcttatgcttatatgactgatacgttgtatagggagcagtttgctgattatgtaaaaggtgtggatttgttatatcatgaagcaacttatggaaaggatgctgaaagtttggcaaaggatacgtttcatagtactgctgagcaagctgcctgtatggcacagctggttggtgccggaaaattgttgctggggcatttttctgcccgttatcctaatccagacagccttttagctgaagctcaggctattttccctaatagttatatttgtagcgatggagatgtttatgaagtgccgaccgaaaagagaagggtatagtagtttgttgtctaccaaatcatgagagtaacaaaaagttttaaaaactgagtagagctggaattattgcgtaagagttttagtatctttgcaaaataaatattgaaattatgattgtttttccgaatgccaagattaatatcggtctgttcgtgacggagaagcgtgcggatggttttcacaatttagaaactgttttttatccaatcggattgtcggatattttggaaattgtaaaaggtaaaggtgagtcaggaaaatgtgaattttatagtacaggtattgatgttggatgcgaatctgaaaaaaatttgattgtaaaagcatatcgcattttggatgcggattttcaccttccggctgtgaatgtgtatttgcataaagtgattccttttggcgctggattgggcggaggatcggctgatgcagcctttatgttgaaggcattgaatgatttctttaatttgtcattgacaaaggagcaattggagatgtatgctgctcgtttggggagtgattgtgctttttttattaataatatgccggcatttgcatctggtaaaggggaactcttggagaatattgaattgtcattgaaggattaccgattgatattggtgaaaccaccttttggtgtttctactccggaagcttatgctggaattgttcctcatccggctgtatttgatttacataaattgagtacattgaagccagatacatggcaagaatatgtttgcaatgattttgaggtgagtgtgtttgcaaagtatcctcagttggcaattttgaagcagcggttgtatgatgccggtgctgtgtatgcttccatgactggtagcggttctgcattgtatggtttgtttcctcgtgataaggaaattaaaatagaatgtccagattgctttgtctggcaagaggattaatatggataatggaataacggatgaaaactaatttgataattatattgatagggttggtttccgcttttatcggcattgtgcctttattgaataaaaaagcggataggtattctttgtttgcggcatttttgctattttttatgatgccttatgttataatacattttagcttgccttgggcgcaatggtggtggaaaggaatggtaatttctggtgctttgacgttgcctttagttattacttcttggcggggtagttctcgttgtgctttccctctcttgttggtatcaattgttattggtgcgtttatttcgtttttagtgcatttcttattatagtaataagaaataagggattgacatttaatagacaatcccttgtattattattcgttttctcgcattgtaaatgagtaggcgatggcagatacacctccgaaaataaaagcgagtcctgtccataccacaatgttaagaagtcctaacagagggtggaatatcagcaagaatgaaaatactaatgtcagtattcctgctgtcagtagccatccccagttgcgaatgcgacaagcctgcatttgcagtgcctgaccgataaagttgatactggtgcacataagcatgaatccaacaaagaaaggtagcatatcggcagtccaagccagattacccaatagcataaatccaatcacgaggtctaatagtccgactacgagattccaaccccaagtgtgagaatgacgtcgggcgaaggcattgaatatttcaccagttccataaatgataaacatgaagctgaaataggctgccatagcgaaataggattcaacagggttgcgaaatacccaaatgccacagataatagagagtatacctatcagtagcatcagccaccaatagcggttggtaacaatgtgtttttttgttttgttcataatataattttttatagttgttgctgggtataacgcaaattggcaaagaaagtttggttattcctgcttttgtcttgctaaataattgtatttttgcagtctaaatgaatatatagttgtaaacaagtaatataaaaacagcatgagcatagaaagtctgttgacctctaaggttattgaagcggtaaaagaatgctatggagcagaagtggaagctgataaagttcaattgcaggcaacccgcaaggaatttgctggagatttgactattgtggttttccctttcacccgtttttctaagaaatctccggaggataccggtaaagagttgggagagtatttgaagcagcatattgaagaaatcaaagattacaatgtggtcaagggtttcttaaatattgagatttcttctgcttattggttaggcgtgctgaatgaagtggcaaaagatccgaaatatggatatgtgcatgaaaagagcggccatacctatatgattgaatattcatcacctaatacaaataaacctcttcacttggggcatatccgtaacaatctattgggatggtccgtgtctgaaattcagaaggcaaacggtcatgaagtgaaaatggtgaatttggtaaatgaccgtggtatccatatttgtaagagtatggtagcatggaagaaatttgccaatggtgcaactccagaatccaccgggatgaaaggagatcattttgtcggagactattatgtgcgttttgacaaagagtataaagctgagatcaagcaattgatggagcaaggcatggaagaagaagaggcaaaaaagcaggctccgatattgttggaggctcaagaaatgttgcgtaagtgggaagctggagatgaagaaacagtggctttgtggcggacgatgaatgattgggtgttgaaaggattcgatgaaacttacaagttaatgggtgtaagttttgataaggtgtattttgaatcgcagacgtataaaaaaggacgtgatatagtgttgaaaggattggcagatggagtgctttatcgtaaggagactggtagtgtatgggctgacttgacaggcgatggcttggatcataaattgttgttgcgtgatgatggcacttctgtttatatgactcaagatataggtactgcttatgagcgtttcaatgagtttgcaatggatgaaatgatttatgtcgttggtaacgagcagaactatcatttccaagtgttgtctttgatttgtggaaagctaggttttgactgggctaataaaatcaagcatttgtcttatggaatggttgaacttccggaagggaaaatgaagtcgcgagaggggactgtagtagatgctgatgatttgatggaagcaatgattgatacagcacgtgagacttcgcgcgaattgggtaaattggatggttattcagaagaagaagctgaagatgtttataggaaggtggctttaggagccttgaagtatttcatattgaaagttgatccgaagaagactatgatgttcaatccgaaggaatcaattgactttaatggtaatactggaccatttatccaatatacatatgcacgtattcagtctgtattgcgtaaagctgctgaaatgggggtaatgcctcaagctgctgatttacatattgagttgtcggataaagaacagaatttgataaaattgctttcaaaattgccggatgtggtgaaagaggctggtattacttatagtccggctttgttggcaaattattcttatgatttggctaaagagtttaatcagttctatcacgatttttcaatattaaaggaggaaaatattgctttgaagaatttccgtttgttgttggctaaagagtgtgccgaagctattaaaaatgcaatggggactctaggtattgaaatgccggaaagaatgtaagaatatgaatttgacgaattatcatagtcatagtaatttctgtgatggtaaagcgccattggaagattttgtgaaatcggctattgcagccggtttcactgcttatggagtgtcttctcatgctccgctacctttttctacgcggtggacaatggaaaaggagcaagttcccgattatttgagagaaatcgagcgattaaaaggtaagtatgccggacaaattgaattatatgctggtatggaaattgattacttagatgaaaagagtaatcctgctaatgattattttcagcatctgcctttggattatcgaattggttctgtgcatttggtttatacggaaaaaggagaagtaatagatactgatacgaatcctgataatttccaattattattgcagcagcattttgctggtgatttgcagcgaatggtgggctgttactatgaggcttcgatgcgcatggtagagaaaggtggttttgattttatcggacatgcagataaaatagcctataatgcagagttttgtcaatcgggttcaacagaaagcgtttggtactcgaagatgcggaatgaattgtttgatttgattgcggaaaaaggcgtcattatggaaatcaatacaaaggcatggttgaaaaagaattgttttttcccgatgcagaggtattgggcagatattctgaaacggcatatcccggtggttgtcaattcggatgtacatttgccggaactagtgaatgccggacgtccggaggccttaaaacagttgaaagatataggtttcactacaatttgtgaatttcatcatggggaatggcaagaagttggcattcaataaatacttatgaatatggacttggatttaaggaaaacattggaaatggcagagacatgggctaaggaggttggtaaaattcatctgtcatatttccgaggaaataatttggatatacatacaaagtcaaatgtatatgatgttgtaaccagggcagataaagagagcgaagcatttttattgtcgaaaatcggagaattttttccggatcatgccgtattgggggaagaaacgggagaacatgccggagtagcagactatcgttgggtgatagatcctctggatgggacgaataattttagtcagggattgcctatttttacagtttcaattggtttacaatataaggaagcaacaatattaggggtcgtatatgctccttgtcaggaagagatgtacactgcgattagaggggagggagcttatatgaatggaacccccattcatgtatctgtaaaggaagatttggctcactcagtattgggaaccggtttcccttatgacaaaggggttaatcctgataacaatattgccaatttagtggcaattcttccgcatttacgtggaatacgtcgtatgggtactgctgcatatgatttatgttgtacagccgctggatggctggatggttattgggaattgaatttaaatttgtgggatatgtgtgccggagcactgatagtggaagaagcaggaggaaaggtggtacattttcgtacagatagaggtgtatctatcattgctgccaatccgactcttgttgaacgtatcagggagaaagtccgttaaggtatttgattgctaacgttcgcacagattatttgtgcgaacgttgctgtttttagcgtatgaatattctctttttcgtatttttgttcttgattaataagagaatatatggcaacttcaagagaaatgacggcaggaccggctttgccgcttatttttaattttacgatgcctttacttttgggcaatttgcttcaacaagcctattcattgattgatgcagctattgttggaaaatttttaggtattaatcctttggctgcagttggagctagtagctctgtaatatttttgattttaggcttttgtaatggttgtagttgtggctttgggattccggtggcacaaaaattcggtgcgcgcgattatagtatgatgcggcgttatgtatctgttagtttgcagatatctgttgcgatttctacttttattgccgttataacaagtgtattctgttctgatatattgcggattatgcggactcctgatgtgatatttgaggatgcttacatctatttattagtaacctttataggagtaccatttacttttctttataatttgttggccagtattattcgggcattgggagacagtaaaaccccattttggtttttattattttctgctgttttgaatattttactcgacttattttgtatcttagtattggattggggcgtaatgggtgctgctgtggctaccgtattttctcaagctatatcctcgggattatgttatatgtatatgtaccgacattttgagatattgaaaggtgagcgggtagaaagaaagtttgagatgcgtttagcaaataatttgctagctataggtgttcctatggggttacagttttcaattacagcgattggtagtatcatgttgcagagtgccaataacgcattgggaacggcttgtgtggcagcttttacaacagcaatgcgtatcaaaatgttctttatttgcccttttgaaagtttgggtattgcgatggccacttactgtgggcagaattatggagcaggaaaaccgcgtagaatttgggaaggaataaaagccagcggttggatgatgatagtgtatgccgttgctacttttgttatattgatattgggctcgaaagagttggcaatgttgtttgttgatacttccgaaacagagataatcagtgctacagagctttttctacatgtgtcggcatacttttttcctatgttgggtttgctttgtattttgcgttattctattcaaggagctggatttactaatttggcaatgctttctggggtttcagagatgatagcccgtgcattggtcagtattgatgctgttcctgtatgggggtatctggctgtttgttacggagatcctgcagcttgggtagcagccaatattttcttggttccggcttttatttatgtttatcgaaagttgaagaaactggtttattcatcaattgataggtaaggtcgtatcctgtcttaaaaatatcccagctctcttttaaatcgaaaacattgtattgagtcatatccttaggggctattacgatatctgccatgacgcggtctatatcggtgtttcttgcaaggcctatgtgaaatgtccggatagccatacttaccatattattgattttttctgctgtattgaatgaatttatctcaacagcgatgacttgttcgcattgagggcggattggacgcacaggaaggttcatgaaggctccgccatcaatatattcagttccttcaatttctttgggtacgaatacaattggtatagagcaggaggcaataactgccggaagcaatttgcctcggttaaaatgcacggggcgggcattgtttatatcactggccgttacaatcaatgggattttcaattcttcaaatgtttctactccaataaattcatgtagctcattttccaagttattcatggtaaaaaagcctttctttgacatcgctggacggatgaagtcgcgtatcttttttcgcttgaaaaaatcgaggcattgcagaggagaatgtccagatgcaatcatggctccaacaatagctcctgcactggttccggaaatgatatccgggcgcatcccaagttcttgtagtgcttgaagtactcctagatgtacaaatccgcgagcaccgcctcctcctaaagctaagcctaaatgatatagtttgtttatattcatacaacagagaaatgattattttgacttctaaatatacgaaaacggattgtttttgtgatagaaactatgataaaaaagctcaaggcagaattattttttattttcctgacttgagcctttatatacaatctttacaaacgtaaattatcgtatttctgcatttaataagtgtttgtaagcacccattaatttattcataatcttatcgatttgtttgtcggtaagtgttttttcttcatcttgcagcaagaagctgacagcatatgatttcttgccggcacctaatttttcaccttcgtatacatcgaagagacttacagattttaataagtttttctctgtacgcaaagcaatgtcacgaacctccttgaatgtgactttcttgtctaacaacaaggccaagtcgcgttttacagccgggaattttgccataggtgcaaaagtgatgacatgattcttcaaggtctttataatattttcccatgagaattcagcatagtatacgtcttgttcaatgtcagtccgtttcaatactttatggcttaacatacccatagagacaatgtgtttgccattttggctgtatacaatgccttcacgataaatgtcctcgcttgtttcttctgttgtaagagcgtcgggtttgaatcccagacgggtcagtatcatttccacatagcatttcatcgtgaagaagtcgcttttttgcgccttgctgttccaagaagtttgagttttatctcctgttacaaatatggataatttatcctcttccttgtactgttttaagtggttgtctccctcttttttcgtgaagctatatgccttaccaaattcaaacaagcggaggctagtgcttttacggtttacgttgtgggcgattgtttcaagaccaccaaacagcaatgtctggcgcattgcattcaaatccgaactgagcggattgaaaagcatgactgtattttccgatttataggtttcaagattttcaaaatacgcagcttttgtcaatgaattgttcatgatttcatagaaaccattggcaaccaataaatctgatattttgtttttcaactgaaaatcatccggtttttcagagtagctcaatgtagagtttactttagctggcacttctatattattgaagccgtagatgcgtaaaatatcttctataacatcagcttctctgcgtacatctacgcggtaggggggaatgtgcaacagtaatttgtcttcgttttcctctacgattttgatttccaatgctcgtaggatgtttttaatggtatcgtgtcctatcgctttgccaatcagacggtcaacgtgagcatagagtaactccacttcaaagtcggcaatcggattcggatagatatctataatgtctgatgtaatttttccaccaccggtttcctgaatcaataaagctgcacgtttcagagcataaattacaatattgggatctgttcctctttcaaaacggaaggatgcatcggtgcttaatccgtgacggcgggctgtcttgcggacaaataccggatcaaaacaggcactttcaaggaatacattagttgtttcttctgtgataccgctgtccaaaccaccgaatacaccagcaatacacatgggttcctctgtattgcacaccatcaagtcgttttcgtttaattcgcgctcaacgccatcaagagtggtaaatttggttcctgtagggaaactgcgaatcacaactttgttacctttgattttatctttatcgaaagcatgtaatggctgacctaattcaaacagaacatagtttgtaatatccacaacattattgatggggttatgaccgatagccttcagacgagtctgcaaccattccggtgatggctggacttttactccttcaatgcatactcctgcatagcgtgggcaagcttccggacgtgctacctctatgctgattccggcagtattgctgtccgttttgaaagcctcaacagagggcagagtgtaatgtatgtcgcgagtctgttgcagatatgcagccaaatcgcgtgctacaccgatgtgcgaagctccgtccacacggttcggagtgatatctacttcaatgcaatagtcattggtaatattataatattcggcagcaggagtccctacttttacatctgcaggcagcacgataataccatcgtgcgaagtgcctacaccgatttcatcttcggcgcagatcattccttctgaaggacaaccacgtaattttgatttcttgatagtgaactctttatcgccatcataaagtacagtgccaatagttgccacaataactttctgtccggcagccacattgtgtgctccacagacaatgggggtgggacgtccgtcaccgacatcgactgtagtaacatgtaaatggtcagaatcagggtgattttcgcaagttttaacttcgcctaccaccaatcctttcagtccgccacggatagattctattttttcatagccgccaacttccagcccgatagctgtcagtatttcgcagatttcttcaacattcaaatctgttttcagataatcattcagccaattcagagatatattcatagttctattgttttacagtgtttagcaaattgagagcatccgttcaatcggttttaaagcacgttcacggatttcgtccgaaactttcacgacatattgctctttttccaatgcttcaagtactccttccaaggttacttttttcatttggccgcaaatggtttgcgggtggatggggataaattccttgtccggattatcctttttcagtttgtgcaatgtttcaatctccgttgcaatgatgaattgcttcttcggtgattggtttgcatgcttaatcattccggctgtcgaatacatatatgcttgcggcaggttcaggatacggtcgtcatgcgagcagtcggactcgggatgaataaggatgtctgcttccggatattctcggcttttttccaaaatcatttcggcagagatgcgtgcatggacacagcagtcgccttcccataattccagatggcgtcctgtctctttcataatccagctacccagatttctgtccggtacaaacaacactttctggtcgtgcgggatactctgtaccactttcagtgcattggctgaagtgcagcagatgtcggtccaagcttttacatcagcggttgtatttacatagctcaccacaatgccgtccggattggcttctttccattttttcagatcatatcctgtaatgctttccgccaatgagcagccggcgtgttgggccgggataagcactttcttgtcgggagagatgatagctgcggtttctgccataaaatgtactccgcagaatacaatgatgtcggcatccgtcttgccggcttcttgtgacagcccaagggaatcgcctaaatagtctgcgatgtcctgcacttccggacgcgtataataatgtgccagaatgacggcatttttctcttttttcagttgctgtattctgtcaataatttccgtattcgtcataacatttttatttatgggctcaaagataataagaattattaatccttcctattttatattcatactgatatcaagtgcagttacagaatgggtgagggcacctacactgataaaatcaacgccggtagcggccacttctttcaatcttggaatgctcatatttcctgatgcttctgttttggcggctccgttaatgattttcacggcttcggccatatcggcattgttcatattatcgagcatgatgatatcggctttggctgccaatgcttcgcgcacttcgtcaagattggtggtttccacctcaatttttatatctgcagggatgttggcgcgtacggctttcacggcattggtaattccgccggccaccttgatatggttgtctttaatcattgacatatcataaagtcccatgcggtggttcgttccgccgccgtcttttacagccattttatccaatactcgcaatcccggagcagtcttgcgggtgtccagcaattgggtgtgtgtgccggccagctcctttacatacttggcggtttcggttgcgatgccggacatgcgttgcagaatgttcagcgacaaacgttctcccagcaacagacagcggtagcttgcttcaatacgcaagataatatcgccttttttcactgcatcaccgtctttcactttgggctcccatacaatgtctttttcaaaacgctcgtatacttttttggcaatttccagaccggaaatcacaccatcagccttcattttcatttcggcaacagcgcgggaatgtgcgggaataatagaattggtcgttacatctcctgttgcgatatcctcttcaatagcaaggtctatcagttggtcaatcaatttgtcgtattgcatattatatggtttttacatatttacatcaatgggtattgtcttgatttctttgtctttctgttgcacaatgtggaacagatattgctcgttgctctgtggaaaatcttcacggaagtggccgccacggctttcctgacggaagagtgcagaacagataatcagccgtgctaccgtaatcaggttatggctgatgagagaataatattcgttctcttcggatggaatttccttttccagttcttccaattgtttcagtccctcctgtagtagggcagcattccggatgataccggcatgtaccgtcatcaacttggaaatctgttgtttcaattggatatatctaggggcatactgctcgttataatgatagcgggttgtaaagcgaggagtcttttccgtttgttggtattggcgagaagcttccacggctcttttgccgaacaccaggcattcaatcagcgaattggaggccagtcggtttgctcccatgatgcctgatgatgccaattctccgcagatatacagattgcggatattggtttgtccgttgaggtcggtcctcacaccgcctaccatatagtgggctgccggggcaacaggaatgcggtcgcacatgtctattcccaattccttgcatttttcatagatagtcgggaaacggcgttttatagcctccggatccaggtgtttcagtgacagccagacaaaatcctgattgtatttgcgcatctgtccgtagatggattgtgctacaatatcgcgtggcgccaattctgccaattcatggatagccggcataaagcgttcgccattctgattgatgagccaggcaccctcgcctctgacagcttcgctaatcagaaaagcctcttccgaatttgtacagatagcggatggatgaaactgtataaactccatatcggcaatttcgcagcctgcattataggcaagcgccaacccgtccccgatagtcgtatgggggttggtggttcgtttatagatagcggaagtacctcctaaggtaaggaatgtatgcggagctgtataaagctcttcggattgggtcaccagattccaggcacgcacaccgtaacaggtattgttatcctccagaataccgatgacagagtggttttcgaaaatgtctatgcgcggatgattaatcaccttgctgatcataaagctggtcaccatccgaccggtggcgtcgccgcctgcgtgaagaatacgcttccggtgatgtccaccttcaagccctagggcaaggctgccgtcttccatgtcgaagtgcatgccttcggcaatcagttcgcggatacgttgcggaccttcgtttaccaaaatattgacggcagggtagtcgcataatccgcgtcctgctataattgtgtcctcaaaatggagagcaggcgcatcgtcctcatccgtgactgctgcgatgcctccctgtgcaaaataggagttactctcagtaattcctgattttgtcaaaagcgcaacctttccgtatgctgccgcatgatatgctgtatacaaacctgcaagtccgcttcctgcaatgatatagtcgtaatgtcgcattttcaaaaatgtaaattgatgcgaaagtatcaattttttccgtattgcacggatgtttgctgatttttttatgcttgttacaggagttttctgttgactatactacttaggtcgcctataacgccgtgcaaaaatgttcggaatagccactcccagagagatgcagaggatgattaatgctgaattgatgccgtttaaaaaagcgttcgtcacttctcctatcacaccttgcatattgatgaatgcaaatatggaacggtacattaatacccccggtatcatcggaatgaccgagggaatggctaatacatggataggcacatggaaataatgcgatgctttcacagcaagcaggctgacgacgatacttcccgtaaaagaaccgatgacaggtccgtatcccagattcagattgacaaaattccgggtgcataccgcaatgatgcctccgattgccaccacccacagcaggtggcgttgaatgttgaatatcatggaaaagccgacagcagcaatggctgcggcgatggcatagatataataaggatcgtgtggcaccatactgagctcactgaatttatagtcgatttccatatcattcatcaccagcacccgaatggcaaaagcgatgccgaatgtcatggcgcccataatgacgatggtattggcagcccgggtgatgccgaccagcagatgattgtctatcatatcgtctacaaagttgataagaggcactccgggtacaatgaatagggcacatgccagaagcggctggaatggggtgtcggataatccggtgaaagaagaggcatacgccagacaggtggatataaatgcagcgatggcgatactcatatatacattgatgcctttttcaatgcaataggtgcggaggtgaaatccggcaaaggcgcacagggaggtaaacaaaaaggccatccagtcgcagccgaacagtttacagaatccgccacaggcaaagcctgctccaatcgcaacgaggttgggcaagtaattgcgtggctgacgggctatcttctgcagctcgtcttcatattgcgtaagggtatagttttctctgacagcttttcgggacaattgactgatggctgtgattgtcgtcatattgattccgtgtttctggcatttttgaaacttggaaaaagaatggctttcgtcactgacattcaccataatcatagtccacctgatatccagatgaagcttttcttccggaatttccataaaggcagccacgcgtttcatggtgcgttcaatgcggttggtatctgctgcactttccattagcaatttaccggtgcggagcaacaaatccagttttttccgcagcaacggaatattcgaatttatgggtgtctcttttttcatgctttattttgtttttgatgacattaggcaagcaggagtatgagcagttgtgctgccaatacacggaggaacatcgtcagcggatagaccgtagcataacctacagagggtgcgtccgtaccggtcagttcggatgaaaatgccaatgccggaggattggtggacgagcctgcaagtactccaatcagggtgtaatagttgattttatatagtttcttgccgatgattccggcaacgagcaaagggatgaccgtgatggcaaatccgtatagaatccagatatatccgccattgaggagtgtgggaacaaaattctctccggcacctaatcccaccccggcaaggaaaagtgagattccggtttcgcggagcatcagattggcgctcattgttgtataagtcaccattttataatatggaccgtatctgccaatcaggatggcgacaatcaacggcccgccggcaagaccgagcttgaccggctgtggaatgcccggaatgtggaaagagagactgccaagcagcacaccgagtgcaatgccggtgaaaatggcaatcagattgggatggttcagtctctttaaagaattgccgaagcgttgttcggcttgcattaccgacaattcaggaccgacaaccgttacccggtcgcccagttgcagggagaggttgccggctgccaccaggtcaatccctgcccggtttacacgggtaatggtaacaccacaggatgtgcggatttgcagctcggacaatcgttttccgttcaattccggcttggtgattaatatcttgcgcgaaatcatatccttggatatatcatgccagttcatttccacgatgttgcctatcaaagcaatgatggcttcgatatcgttttgtgtggtgataaccagtatcttgtctccacaatacagggtggtctgtgcattcaccaattccggttgaccgttgacgtgacagatgcgtgatacgacaaattcgcgtgtagccagccgatgcagatcggcaatggttttaccctccagtccctgattgacaacctccagagtcgctctgaccgttgtcgggttttgatgggcgtccgcaccctcgcttgcttctttctcttctttttgtgtgttgatgcggagcaggtatcgcagtgtcagtattgtcagaatggctccgattactcccaatggataggccactgcatagccggtggcaatatcatcggcatccgctcccaggtggatgtcgctgaaagcctgttgtgcggctcccagaccgggtgtgttggttacggctccggacatgatgccgaccatggttgtgatgggcaatccggttgcgtaatataggacaagcgtaacagctactcccgataatacaatgatggctgcaagtttgttcagggtgatgccgccttttcggaacgaggcaaagaatccgggacccacttgcagaccgatggagtagacaaaaagaatcagtccgaattctttcagaaagtggagtaggtgttcgttgacattcagaccgaaatgtccgaatgtaatgcctatgaacaggatgccggtgactcccagagaaatgcctgcaatttttatttttcccagcatgatgcccccggtgatgaccagtgataaaatcagaatagagtgggctacaccgccaccccaaagggattcgttaccccataacaaatgatccaacaattccataattgatgtttttatgtatgtctaaaaaatatttgtaaataccaccgatattgaaagcctaaccctcgagtgctgtcaatttcgaattgatttggcaggtcttctgacttactctttttccgctaccttcccgatgaatatcagtggtacaagacttgcggaacctccatagagttcacagctacgggatagtccgggattttcacccgattcccttttcactttcgttcatgacggaactaaagcaccaaatccaacggcaaaggtaaagattaatttcaataaagcaacactgcgtggcgcaatgataattttccttcattgcgtctgctttgcgccctcttttctcttactttcctccctcttaaatataagacatctatatatcaaagataacacaactataagacaaatataatagtctgttatctttgtcttatagttgacatatatttaagttgatgataagggggatgtaaacgagagaaatggaggggagattatttattgggtgcaaatgaaaaaactgtggatattgatgaatattattatcttttttcttggctattctaaatattgtttgtagttttgcgaacaacaaacaaaaatataaatggaaaacaaagaatactcaacgaaacaggaacaacttgcacgttttgccaaagcgatgggacatccagcaagagtcgctatccttgaatttttggctaaacaaaattgctgtttttttggagacattcatgaagtgttgcctatttcgaaagcgactgtttcccagcatctgaaagaactgaaagatgctggtttgatacaaggagagatagaaataccgaaagtgaaatattgtatcaatagggagaattggaaaatagcctctgtgctttttgtcgagtttttcgaccattgtgcatgtaaaaaagagaattgttgtgaatagcagcaattttttttagaataagtgttcgttatttgacgaattacaaacaaataaaatctattaaatcaagagcaatgaaaaatgtaattttaatgatggctatgtgccttggaatgtttgcgtgtggtaacaataacgcaaaagagaacaaatcaacagaagaacaatcgcaaaaagaccatgtggaggttctttattttcacggcaaacagcgttgtgccacttgtgtagcgatagaaaaaaatgcaaaagaagctattgagacacaatttgccaatgaactgaaaagcggaacggtcgttttcaaatcaatcgatatttctaaggcagagaacgagaagattgccgagaaatatgaggttgcttggtcgtctttgttcatttgtagatggaaagacgggaaagaaacctataaaaatctaacagagtatgctttcgctaatgcccggactgctcctgatacattcaagagtggagtaattgaaaaagtcaaagccttaatgaaataagccttatggattggttacagactttattggatagtagcacgactcctgctttgactgcattcttattggggttactcacggcaatatctccatgccctttggctacgaacatagccgctatcggattcatcagtaaagacattgaaaaccgctgccggattttccgaaacggactcttgtacacgcttggtcgtgtcattgcttatacgatattgggtgtcgtattaataatgatattgaaagaaggggtaagtctgttcggcatccagaagtttatcggcaaatatggtgaattaattcttggtcctgcattattacttatcgggatgtttatgctatttggcaataaacttaaacttccgtcctttggtttcaaaggtaacggtgagaaactggccagcaagggcggctggggtgctttattgcttggaatattgttcgcgatggcattctgcccgaccagtggtgtgttctatttcggtatgctgattccaatgtctgcaacagcaaccgcaggctatctgttgccagtacttttcgctgtcgctaccgcattgcctgtcttgattgtcgcttggatattggcattcagtgtacagcacatcagtagtttttacggcaagatgcagacggttcaaaagtggctgaattggattgttggaggcgtgtttacggttataggtgtatattattgtgtgattatgtatttataaaaggtaagaatatggaaaacaagaaagaaaacaaaaagagattttgggcatcgttattctctccgaagccttgctcttgttcatgtggtgacaacctgattatagaggaagaggaaaaacagacagcctcttgttgttgtgaggacaatgcagctacgacaaaaacgggcataaaagaagtaaaaatactggggccgggctgcgccaaatgcaagacaacatatcagattatcgagaaagtaatcaacgagaataatcttgatgtgaagatcacgaaaatcgaggatattacagaaatcatgagctatgatgttatgggaacacccgcagtcgtagtggatgaaactgtgaaaataaaagggcatgttccttcagaaagtgagataaaacaaatatttggcatataagatgtagttatggatacaaggaatgaattgaaaatactctttgggatgatcgctgtttttgtggcggtcttcttcctaccgctcgaaagcgagcggtttatgacagccgtagatgctaccctcgaccttgcgaaatggtatgcacaggaacacgttgtattgtgtctgcttcccgccttctttattgcaggtgtcattgccgtattcgtcagccagggttctgtgcttaaatactttggcgcgaacgccaagaaatggatctcttatacggttgcagccgtttctggtggtattcttgctgtatgttcatgtaccattctgccgctctttacgagtatctacaaacggggagcaggattgggtccggctatcgcctttctctattccggtccggcaatcagtattctgtcaattattttaacggcacggattttagggattgaaatgggtatcgcacgaacagttggagctgtactattttctgttgttatcggattggctatgtcgtttatttttcgcaaggaagagaaagccaaaaaagaggagcagatgaatatcgttccgctgcccgaaaaacgcccgatgtggcagacttcgttccatttctttacactggttctcattctcgtatttgcgaattggggtgcacctgcggcttccgatacaggactatggtacggtattttcacttataaatggtacataactgaaactttatcgcttttattatgcttgtcgcttgtcaggattttgaaacttcgagtgcagtgggtggtgctcggtgcagtagcgacagccatctctgcacttcttgccaatctgtttatcggtaatgtgaaactggttccgcttgtgccgatgattgtagcgattaccgctctttccgtcattctcttgtttgataagcgcaatgaagaaaatcgagaatgggcgttcgcctcgtggggatttgccaaacagataatgccgttgctggctatcggtgtggtaacggcgggcttcctactcggttcaacacatgatagtacagccattgctggtgttattccaaacagttggatagaatgggccgtcggcggcaattcgttgctatccaatttcttcgctagctttaccggggcattcatgtactttgctactttgaccgaagtgcctattattcaaggtctgttagcttctggtatgggtaaaggtccggctttggctttgctattggcgggtccttcgctgtcgttgcctaacatgctagtgattcgtggcgtattgggaacaaggaaaacggttgtgtatgtggctcttgttatcgttatggcgacagtttcaggatttgtatttgggaatttcttttgatttatatattatttgagcgtcatgaacgtattgattctttgtacaggaaatagttgccgcagcccaatggcacagggtttcttacaatcatttaatgaaaatattaacgtatattcgggaggaacagctccggcagcacaagtaaatgccaaagccgtggaagtaatgaaggaggtgggaatagatatcagttcgcatgtgcccacgcatgtaaacgaatatctctgtcaggaatgggattatgtgataactgtttgcggcggggcgcataaatcatgtccgatatttacgggaaatgtgcaccatcatttgcatattggctttgatgacccggcaacagctactggtaccgatgaacaaataaccgataaatttcgtcgtgtaagagatgaaattcgagagaaatttgtagagttttacattactgagattttgaaaaaagaacgtccccaatgtatccacaaaggaatttcagagtgtaaagaatgtaggtaaacgtctaaaaggtgtcgcttgggtagcggtgaaactatttgttgcgctatatcggttttgccgtgattattttgtaaaatgatttttttaaaagaaatattaactgtacttttgcgccgtcttggttccggaccgactatcaactgtcggtatccggatgaaaagggaatccggtgagagtccggaacagatccactgctgtgagtttctgtaaccttttcggtaatcgttgtccactgttccggcatgtcgggatgggaaggaagccggaaagggaaacgagtcagaagacctgccattgacatttttgtttaacgttcaaggggaaggtgaacgttgaatcagtcggtaggcttgtatctttgtgactattctgtgctttttccttgacaaattttgattgatatgtcattgaaaaggcttttttgttttctgtccgccgtcctgttcgggacattgttttctgcatgtgataaaccgggactttatccgggtggttcgttgaaagacgctccgattgagtgtctggtgctcaacgagggattattgaataccaatgcaggtgcgctctctgtcgtatatcgggacagtaccgttgtggtggatgcttttcaggatgtcaaccatcgtccgatgggagatgtggcacagtccgtgacgttgattaacggaaagtatttcgtagccatgaacaactctaagaaagtggaaatcttggatccggtgacattccgttcgttaggtacgatattatacaagcaggcgggttatccgcggcagattgtgccggtgtcccctacggaagctgtcgtgtcggatttgcgcaatcagctggtgaggatacgtaccgtcgagccgtatggcgagcccctggaatatatttccgttccggcatggattgaatatctgattggtgccgagaacaagattttcggaatgacatcacgcggtctgctggtgtttgatgccaaccgcattgtgaaagaggaggcccggttgttgcgggatgtatataatgaagagtataccaagacctgccggatgctgaaggacaagcatggcaagctgtgggcgttgatgaatcgcaagcagggcggtaaggttgtcggtattgttctggcgtgtatcgacccgctgcgcgaacgggtggtgaaaaaatatgaactgcccctgggtgaagagctgccggagggaacggtgggtgccttggggtatatcaactacaaccgtacggatatcgacccgacagggacgtggatttatttcaatgctgccacccgttcggaggtgccgaacagtcagggtgcgtacgagcagcagagtgtcttccgtctgaatgtggatacggggatgttcgaacgctatcgtgatttgccgggcgtggggatgatgtacggatttgccgtaggtcccaccggtgatgtctacttgtgcgactgtctggattatacagcacagcgtggttatgttcgttgttatcgggaagacggacgggtggacagctatcgggtgggagtctatccgagccaggtatattttccgggatatgaatattaatcagatatattatgagaggattttgcagtatgggagggttgttgctggcgttgctgttgtgcgacgttcggccggtgtcggcgcaggggcgcgattccattgccatgtatggggtgttggatacggtgcaggtggtgcgccggcgtatacagcatgccaatgaagccaatgccggtgcgagagtcagtcgtattgaccctgaaatcattcaggctaacaagacccgctcgatggccgagttgctgaccgattatacatccgtgtatattaagagtctggggatgggagctttgtcaaccgcttcattccggggtgccggtgcttcgcagacccgggtcaattggaacggaatcaacattacgccgccgatgtcgggaacttttgatttttcgcagataccggtgtttttcaccgacaatatcagtttgtattatggtagcagccatgtgaaaaacggtacgggagccatcggcgggagtgtgaattttttcacggatccggtgtggcagcggggtgtcagcggcaaggtgttgggagaggtcggctcttacggcacgcatacgggaggcggacaggtgaatatcggcacttcccgggcgagctttaagacacgctactactatcagcattcggacaacgactatacttatatcaacaagattttgacaaatgtgcctttccgagagaaacggcaggatgcacgctatacgcagtgggcggctatgcaggaggcttattttcgtctgtcgccctatacgcgtctgacggccgtaggatggtatcaggaaaattcccgcatgttgccgcaaccattggggctggtgaatacatcacacgagaagcaatgggaggtaaatgcccgggcgtatgccggattggattttgccaaagggattcatgccctgcatttgaaggctgcatggttgtattacaggcagaattatgacaaatggtatgaaggcggtttgttcgacccggaaggaaaccgcaataaatcgcagacatggcaggcggtggcggattattccgttgcgccctgcgacaatttggtagcggatgtgacagtcacctatggttacgaccgggtgcgggtgagcagctatatggatatagattcttctaagtatgtgttgggcgacgtgatttacgacataccggaggtggagcctccggtagtcgcgcgtcgcaatgtggtgtcgttgcaggcagccgtacaatggtcgcctgtggcatggctggctgtgaacggacagtatatgttcgaacagaatgacagccggggagtatcgacgggggcattgggagtggtggcgaatttgttggggcatgagctgcaggtgaagggaagtgtggcgtataactaccggtttccgagcatgaacgacctttattggagaccgggaggaaatccggatgtacgtcctgaaaaaggctattcgtatgatatggcggtatcttatcgcaaggatttcaaccggcaatggtcttttgacgcagaggctgcgggttatctgatgtatatcgatgattggatattgtggttgccgaaagatggcaaccaatggatatggacaccgcaaaaccaccgcaatgtgcggtcggtggggacggaattatacggcaaactgacttatactccgggagcatggcgttttacgggttccggcaatttcagttggtcgcagtcgcgcacccgcaagaaaaagcatgtggacgacggctcgtatctgaaacagattccttatgtgccgagattcaaatggaatttgcgtgcggcggcagaatggaagggggcttttttctcctggcagatcacttacatcggacggcgtttcatcaccacggacgaagcgtatgccactgatccttatcccgtacataatctgactgccggttacggctatcgctttcgcaacgggatgcgcatcacaccgcagttgcgggtggacaacctgttcgacaaatattacgagtcgactcagtattatccgatgcctttgcgcaactgtctgttttcgatgatgtgggaattttgatatgtttaactgataaataagttatgaagaagcatttgttttatgtagccgttctttgtctggcggcgggagtggctgcttgttcggagagcggagaagatgagccggtattgccaccgggagggaatggcacggaaacccccgggcctgtggctccggatacggtggcggcagaagtgtctattttgaatctgacgtggaaagaggcggtgttgcccggtcaggaggtgcgtttgcgtgcaaatattatacacagttcccatgcccgtttgcaatggtatctggatggagtagaagtgtcgacagacaccctgtatgttttctcttcgcagcaggaggggacctatcatttgaaagtgacggcaaccaatgatttgggctgtggttcggacagtctggacattcgtgtgatgaatggtttcagaatcggagacatcacaaattggaccggcagcggagccaacgaagcggtattggcaatccagtgggtgagtgccgggacggaagatttgttgcatccgaaagacgaggatgtatttttcagagcctggggataccgttggggagctgagccgaatgtaaccggcgagacaatgattcgagccattgccaagaatgatgcccgtctgtttgtgatagtagccaccgatggttggggcacggctattaaaggattcggttacgatgggaacggcgacggcaagatacatatccgcaataagggatacaaagacagtgagcgtgaaatgaagccgcttgaattgacggaaaagaatttcagtgaaggtgtatatgtgcagaaattcggtgaaagcgtagaagagtttgaagtgttgagcgaaggcgactggtggatgggcggttggtacacggcttatccgagctattggttgggagcaggggaggctgtgttggtgtctgaggagtattcctattctcagttctatgcaagcggtaggttattagagcatcactcttgggatgcctggactttttcgcctatcaactacgaaacaaaagagaatctcctcccgataccgcgcttgctgaaggccgcagataaataacgatgaaatgattgttgacaatcgaatataaaatcaattaattaatttattaaaaatgaaaaaatcaaattatttagttctgttgttcggtgtatttgccggactgttgtcatcttgttcggatgataatatttacaatacgtacataaccgagcaggtatctccgtcagccggcttgtcgataacaacaatgggggacggaacgttcactatggagttgacggattcgcttgtattccgggcagcactgaatgcaaattctcctgctacagcttttaaatgggctgtaaacgaaactgaggtttcaacagactctatctacgtattcaaaacggatagaagcggcaaatataatttggctttaaccgtaagcaatgcggacactgcctttacacagaaagctgatattgttgtacgcgaaggaaagtataagcatggaacctttattttgaatgaagggctgattgctacacacggttcgctgatttatatcagtccggaaggtgaaatcactccgaatgcctaccgagctgtgaataaaaagactctgttttctttgacagaagatatgtttattcatgacaataagatatatatcgtatcacagaagagtgatattcccggaaattatggggggcttacgattctgaatgccgagacattgaaagaagaactacgttattcattccctgagggtcagataaaccaacctacacatatttctgttttgagcaaggatgacatttatatgcgtaatgctaaaggaatcagtgtgtttcgtctttctgacagtacgatgacttttgtggaaggttctgaaggagctcactggaatacaatggctgtggctcacaataaggtgttttcaacatatcaaaatgaaccatctgtcatggttatagaaaaaggggcaacaaaagtttctcataagatacgttttaaaggtttggtatccggaattattccttcgtcagatgggaaattgtgggtatcggacgaaaccggtacaatctccaaggtggatccggatacatacgaaattatagatgcccatacattaaaaggtaaagctgctcaattattgaaacgtaatccggcgagcagccaggcggcagcacctcatattacggcaaagggggataccatctatatgagcgcaaccaagacggaaatctggtgtcatatatttggcatgaatcaaacagctcaagctatggatgtaaaaagataccattacatacctgattcggaagattactacgatagtcctaattttcaggcatacaatacttgcgccgttgatcctgtaacaggagaagtgtatttgaataccttgatgggatttggtggttatcgccatcggaatcatatttccgtgtttaatttcaaatgggattatgatcctgattggggtagtttagatgtaatgatacgtctttcgcgtgattattctgggtatttggattatccttcaaatgtatattttacgcataacttttttaatatagcaaagtttaataattaaaaaatcaattatgagaaaattattttattcgtttgtaatgtgcctgtttgcaggcatgatggtgtcttgtaatgaagaggcatataattttgtagaacctgaaaatgccgttatcaaggaaaccgttgttcccgaaatgaaaagtgcaaacggacaaaaggtatcaacaattgatgatattgtcaattggaccggtgtcggagaaaatcgttctgtactttccattcaatgggcagaagcggcaggaagtgcgacttccgttcgttttttggcttggggatacagatggagcggtagtgcagtgggattggatatgataaaggctgtggcgaaacaagattcccgtttgtatgtagtgcttgccaaagcatggggtgaaatagtaatcaaagggttcggttacgatggcaatggagacggacatattacggtaagcaatgcctctttgactttgacagaagcagattttgttgatggaatttatctggaaaaatctggaaatgattttgatgaaatgaaaactgctgatgcagcggatttgtggatgggaggctggtataaagcgtatgcttcctattgggttggaactccgggtgtaaatgtgcctgcttctttctcttattcaaattttgcagcaagtagtcagaaattgcagaataattcttgggatgcatggactttttcaaccattaattcgtctcatgtaaacgtaaatcctcgtccggatttgctggaggctgctccaatgaattaaatagaataagggctgtgattgccctattcgttatattgtaataaaggcaatgccggagggattcacttccggcattgttattttattgtttcattagttggggaaagtagaagatattttttacaagaatacttgcagggataaattattatccctatatttgtatatataaaataataaatatgcctacaatttttgagatatttggtttacgttttttctttttttcagaagatcaccaaccgattcatgttcatgtggtaaatggtgatggtgatgcaaaaatagaaatagaacctgaaattaggctggtgtataatcatggtttaaagattaaagatgtaaaaagagcattagaacttgcaaagatgtataaagatgatatcatagaactgtggaatcaatatcatagctaaataaatatatatatatggaaacaattaaaaatatatggtttgaaaatgaaaggattttcatgctttctagtgctgataaggtatatagcagaccacttgaggctttccctattttgaaggaagcaagtccgtcagaaagagcaagttttacaatagaaatgcgaggaactgcgttgaggtggaagcatcttgatgaggatattcatatatcaagtttttataatacggaagagccagattataaaaacgagatagcaatgattttcaaacgattccctcagttaaatatatcggaagttgcgcgaagtataggaatcaataaaagtctccttgcaaaatatatatatgggataaagaaaccgagtgaagaaaggaaacaacaaatcaaggatgcattacacgttcttggagaggcattagtagctgtttaaatcagaataaatgcatcgacggggatggatagtgtgcggtctgtatcaatcaggcagttttcgaaggtgaggaggttgtccggtggcaatatgatgatgactgttttcctttccggtaaaagatagtgctggtctgcaccggtgatttgaaaaggaaggtctgattggtttgttattgccatacatgaatttttcatgggttttgttttcaggcaggattttaccaaaggcgataagatgttttcttggcctgcgagggtgccgtcgaatagagcaacggtgcgtccggcaaacagggcttcgcgaattcctgcgagacttttttcttttgcaaacaccaaggtgaggggacgcaggtgatttctgtagacgcttaaggtggtgcagtggatgtcggtggcggcaatgaacgcttttttgaacgaagcgcaccaatggatggcttgcggatagaagtctttatagttcatgatttctatgccgtggatggtattatcggcaagcatttgttcgtggatgggatatagggagacacggtggtccggccagccgggatggttccagataatgaaagctccttgtttgcgggcttcggcgatggaatccatggggtcttctttttccagcaggttggcatcttgcagaaatagggcattcagatggcccagcggtttgtcgcgggttatttcaactccgggaatgacaataaaatccatgtcgtcggctgcgcggctggcgattttataggattcgttcaagtcgccgttcagccattctttgttgattctgtgttcgatgtggtcggtgattgctacagcatccagtccgtcttgccaggcttcataaatgcgtccgtcgggccatacgagaccatcggaaaagacggtgtgcgtgtggaaatcgcatttcaagatttgataaccgtcaaatccgggtatcgttatttcatttctgataaagagatgattcaagtgtgtcagttcgtacacatccttttttctgttttgtattttgtccgccatatatccttgcttgtagtctgcaaagataaagattccgttgttgaaatctgcatatttgttttagtgatatttagaaaatattgtgggttgtttggttgggaatcttgttttttaatgcgtatctttgcaccttgaaaaaatcacattaacatgactaagagaacaggcataagtttcgcatctttccatttgaaagcttcgtcctacaacttcagtgggatggtatgcgtatattggttctccggatttatgtaaatttcccccttttctatctttctgttttatattcgattgatttttctgccatgtcgctgatgtggacgggcaggaagggtgcggctggaatttttttaatcaataatagtataagttatgattcgcattattgccattatgttaacgggagtggtgttgggttactttttccgtaatttgaaatttacccaaaagactgagcattcaatttcgctgacaattattacaatgctgtttattcttggcgtgtcagtgggttctaatgatgctattgtttcaaatctttatgtgtatgggagccaggctgccgtattggctgctttcggattgggcggaagtgtcctggtgtcttggttagtgtataatttgttttttcagaaaggaggagagagatgaagggaagtttggttgttactgcattttttgttttgggttgtctgctgggttttataggcattttgccttttgaggtgcatgatttgtcaatgtatatattatatgccctgatgttccaggtgggtatcagtatcggaagtaacaagaatttgaaagagctggtgggggcattgagatggaaaatgttgattattccggtaggaacggttgtggggacattgctgttttctgccttggcgagtctgttgctgagccgctggagtgtttttgactgtatggcagtgggaagcggctttgcatattattctttatcgtccatcctgattacacagtttaaaacgccttctgtcggtttgcaattggctacggagttggggacgattgctcttttggcaaatatattccgtgagatgatgtctttgcttggtgcaccgcttatccggaaatattttgggaaactggcaccgatttctgcagcaggcgtaaattcgatggatgttgtgttgcccgtcattacgcattgctccggcaaagagatgattccgatagctattctgcatggtattttgatagatatgagcgttccgttttttgtatctttattctgtagtatgtaaggtttttggaatttattcgttttttacggcggtttgttttatttttgtggctaaactaatttaataaaataagatgattacaaagaataaatttgtctctgtaagctacgagttgagaacagagaaagacggagaagtgttggaaatggctggaacagataaaccgctggagtttatttgcggtcagggacagaccttggattatttcgaaatgaatttgttggaaaagaacgaaggcgacaaatttgatttcgaaattcctgctgcgaatgcgtatggtgaggtgaaggaggatatgattgtagacctgccgaaagatatttttaaggatgttgaggcagacgaaatgaaagtaggcaacacactgcccatgatggatagtctgggacgccgtttggagggaaaaatcgaggagattggcgaggaagaggtccggatgaattttaatcatccgctggccggtaagacattgttctttaaaggcgagattgttggcgtacgggatgctacggacgaagagttggaagccctgcactcacataaatgtggcggatgccatggatgcggatcggatagttgcggcggatgcggctcagaggagagttcatgcggttgtggcggatgtcactaaatttctgacagtacagctatggcaaatgctataggcaagatatttcgtctcacttcttttggagagtcgcacggtgaagctgtcggcggagtcatcgaggggtgtccgtccggtgtggagctttctgtggaagagattcaaaaggagttggacagacgcagaccgggacagtctgccctttcaacaagcagacaggaggaggataaagttgagattctttccggcttgtttgagggaaagacaacagggatgcccattggttttattgtgcgcaacaaggattgccgaagtcaggactacgaccatctgaaagaggtgtaccgaccgtcacatgccgattttacctgggaaagcaagtatggagtccgggattatcgtggcggcggcagagcttcggcgagagaacacattgccagggtggtggcaggagctgttgccaaacaggtgttggcggtgtgtggggtgtctgtctgtgcttttgcggaacaggtgggatgcgttgtcttggatagtccgtggcaggatttggatttgtccaataaggagcggaatgccgtgcgttgtccggatgagcgaaaggctgctgaaatggctgcattgataagtcaggtgcgggagaaaggggatagtgtgggtggagttgtgggctgtgtgatgaagggggtgcctgtcgggttgggtgagccggtctttgaccgttttcagtccgggcttgcttgtgccatgatgagcatcaatgctgcgaaagggtttgagtatggagagggattcagagctgccggcatgttaggcagcgaacataacgatgcctgggaaataagagaggggaaaatgcgaacggtaaccaatcattccggcggaatacagggtggggtgactaatggtgaggatatttattttcgggtggctttcaaaccggtttctacaattgctgtaagacaacggacggtggatcgtcagggcaatgaagtggagttggaggctcggggcagacatgatccgtgtgtggtgccgagggctgtaccggtggtggaagcaatggctgcaattgtgacgttggattttttgttgcaagcaaaaaaagcagagaaaaattatgcagtttgctgaaaactttttatatttggaaaaaattaaatgataatagatatggcaagtattaagagattaaagaaagacattgactatttgacatttgctgtgattgacgattgtttgaattgtctggcttatggaaaaagtaccgatgatatcagtgatattgtagaaaatgttatcaatcagagaaatgtattgcgccagcgtgtaaatgcaggtaaggcagttgctaaaaatgagagaaaagggtattacaaaggtgtccgcaaagaagtgatgaccactgtagacggagctttcactcaattaagcgcattggttaagcaataaaagctttgttaatgatcgatgatgcgcaagcgtcatcttatctataactgcctgacatgtttgggcagtttttttatgacttgtctgtatggattatattgagattccaggcattggagcaataaaagtgagaaggagcgctaatattaaatatctgcgtcttcgtatggcaccgggaagaggattgtgggtgagtgtaccttatggagtgagtgagagccaagtgtacaagtttatatcggataacaaagagtggattgagaaaagccgcaaaagcatggctgtatatgagaaggatacaggagtggggttgcggccgggtgccgaagtcaggacaaagttgcatgtcctgaaaatagagcagacggaacagtcacgaccttcttatcggttggaaggaaatgttatcacgctgtttgtgcccggtcaagtggagttcagccgtatagaaaatattgtccggcagtttttggtggaggtttaccggatggaagcaaagcaatatttgccgcctatagtgaaacattttgcagataaattcggttttaaatatggaaatctgacatttcgggacaatgtgtcgaattggggcagttgctcttttgaaaataatatcagtttgaacgtgaagttgatgaaattgccggatgatgttatagattatgtaatcctgcacgaattgtgtcacactgtggagaaaaatcattcggaggatttttggaagttggtgggacgtgtgtgtcccggatatgctcatttgcgcgaaagactgaaaaattataatacgagagtatagaatatcataaaaggaaatagtaactttgcactacgataaaaaaatacaaatattatgatgcaagataaagtgaaggaaatcagggatacactgaaagaagtgaaatatcccggtacttccaagaatattgttgaattggatatggtgcaaaatatccgtattgaagatgagaaggtgatgttccgtctcgtttttcaagattcaaaagatccttttgtaagtaccgttacaaaaaagtgtcgctctttattggataattataaggaggtggaaatcgagaccatttttgtacatgatttggaacgtccgctttcattggagaaggtaaaaaatatcattgctgtttcttccggtaagggtggggtcggcaaatcgactgttgcagccaatctggccgttgctttggctatgcagggatataaagtgggtctggtggatgctgatattttcggaccgtctgttccgaaaatgtttggatgtgaagatgcgcagccttatttggaaaaggtggggaatcaggatatgattgttccggtggagaaatatggagtgaaaattctttcaatcggatttttcgtggatcctgcttcagctaccgtatggagaggtccgatggcttccaatgctttgaagcagatggtggaacagggattttgggatgaattggattatatgttgatcgacttgccaccgggaacaagcgatatccacctgacattggtgcagactgtggcattgacaggcgctattgttgtgagcacaccgcaacaggttgcgttggcagatgctatcaagggtatcaatatgtttgaatctccgggaatcaatgtgccggtattgggtctggttgaaaatatggcttggtttactccggctgaattaccggaaaacaaatactatatcttcggaaaagaaggtgccaagaaactggcagaagaaaagggtctgcctctgttgggacagattccggtggtacagagtatctgtgatggaggggatgccggcaagcccgtagcattgaatccggacagtatcaccggtgctgcctttgccggtttggctgcagaggtggtgaaaaccgtggaagagaatcatgaacaagcaaaacgagtaagaataaccaagaaataatatggagtggagtattcgctctttagaagagctcaatgaggtggcagaccgttttctcgcgtatgtcggcaatcgtaagatatttgcattatacggccctatgggggttggcaagacgacattcgttaaagcagtctgccgctgtttgggcgtcgaagatgatgtgagttccccgacttttgcaattgtcaatgaatatgtgacaagtgaaggggaatccctttatcattttgatttttatcgcgtaaattcaatagaagaagcgatggatttcggatatgaggaatatttttatggaggttgtcgttgttttatcgaatggcctgaaaaaatagatgaactgctaccggaggatatcgtgaactgcacttttacggaaaatcaggatggtagccgtaccttgaaggtggatttataaatcatgtgacaatgaatgatttagtttgcctggctgacatattgggctctatcatagaagagaaaaacgagctttgctggaccagtgcctatcaagaaaaaacagatattgagattagaaaatccctgattgaaaaaatgaggggttttctaaattaatttgatgaaaaagttggttttttgccgataaaacggaggaaaatcactatatttgtattatgaaaaaggtacaaaaaaatatcgtattgacaacgtcgcttcctcctacggaacgtaaaataatcctcgaatcattggtagcttcctttcgtatagaaggaataaatattccggatacacgggtgcaggctatttatgcacgcgtgaatgaaaaactcaaaaaatggagttgatgattctctccatgggtttgtagtttttctcgctgacatgctgtacggcaattacatattctctgaaatcaattctttcgaaacgcaatccttcgtacccttgtttgcgaaccatcaaattggccaggatgcgtgccgtacgtccgtttccctcccggaagggatgtatgaacaagagttcgccatggacgacagcgacatcgtgtatcagttcttctttgccggggtatatatccggcagttgtgacaaaacttcgttttcaaaagcctgcatgttttggggtatgaacagggaggatggaaaaagaaagcctcctttagacatgttgaccgttctgtagtggccggcaaaggagtagagttccttcaaggctgttttgtgtattgaacggatgtatttgcaatcaaaccgagtggtggtggtcagttgttctgtaaagaggatttctgccatcagaaaaccttcaaattcagcttcagccaatagtgctttgtctgtaatcccttgcagattcggtaattcctgattctcttcccgatttgtaacatacctgctcatagtcttgtattattgtgtatgactctttcttttacaaatatagtgataatttttgtaataatgtttttttgaatggatattgtttatttgattattttgcagttattttgtattaatggattgtagatacattatggaagaaaataaagcacagaagcaaacatggcggattgtatatttggaaagaggttctgataaagccccattcaaacaagatgatttttttaaatgtttgtcggacgtttctgaagatattgtcattttagcggataaagaacgggtgtcggaaaacgatatcaatgattatcggcgtcaattttttaaccagaagttttcggattcaagtgtcgcctatgtagccagtggtaaacagaagttgcatttgggaatattcagcaatcaatggtgcgctaatcatgaaattacagattctcccctgttgatgggatggaaggatgtttttttgaaggcgtatggaggttcggatttaggaagtcatcctttggtcagtgtcggatatagtctgcaaaaggtgggcggtttgcgttttgtacgtttgaacggtgctgttgacaaattagccggagtgggcaagtggcagttgtggaaaaattacacttggaaaatacccggacagtatttgttatccggaatgtttttccgccatttgttttcgaaaaacgacaaggtccagcgtgatatgctgtttcggatgttgctgatactgtttgcttgtttcgcttttgtatttatgccctatgtcagtcaggattatggggtgacgggcgacgagtttgttgaccatcggcatgccgggtatgtgctggattattttgccaagggtgataaggctgctttaaaccagccacaaacaaccttgcatttatatgggaatgccgtacaggtggttacggcggctatctgtcgatggtttgatgtagagaattattatgagctacggcatttttgcggagggttgattggtgcgttaggtgtgcttgcagccggtttgctgggactgcgttggggaggaggtttatgcggtctgttttcgattctgttgatgtttttcacgccgcgtttcttcggtcatagcatgaacaatttgaaggatgtaccctttgcggtgggctatgtattatccttgttctatacggtacgtctgtttgattattttccgatcgtgaaggtccggcacgctttgggattggtggtaggaatagctttggcattgggaactcgttccggaggactgattctttacccgatgcttcttatgtatgccggattgttttatattggcagaagcggtggtttgcatgaatttctcagattcaaaaagcatggggcaatgcttggaaatattctgcaactggtattattggttattattgccagttatctgcttggcatagccttatggccgtttgctttggcaaatcctttgcggaatgtggtctattcattgacgaagtttaccaactacagtatcggtttgcgcactatttttgacggtgaacaaatgatgtcaaacatgttgccttggcagtatgctccgaagtttatctgtatcggcatgccggttgtaatgcttatcggttttttcggttattttttatatgccggtttccggaaaagggaattttcattaatcagtttttttctgttttttgcggcagtgtttcctgtattttgggtgatttaccagaattccaatttgtatggaggtatccgccatctgttgtttgtcattccacctatggtggtgttgggaggacgtttttggagcgggatggttcattgggtgaaagggtacggtaaagtgttagtggtaggaatatttttgtgtctgttgagcctgccggctttgcacatgataaagaatcatccgaatgaatatgtctatttcaatgaatttaaaggcggtttggataaagcctatggatattatgaaacggactactatttcaattctttgaaagaatctgctgaatggtttggaaataatgtattgccggatttaccgaaagataagaagacaattattgttactcaagcatctaaccaattggcatactattttagaaatgataccaatattcgtgtggcatacagtcgttattatgagaagtattgcaaggattgggattatgcgatattcgggaatgtatatattggagaagagcaacttcgcaatgggcttttccctttgcaagggactctatttgctcctgaagttgacgggtatcctatgtcttttgttgccaagcgggactgcaagacggatttggaaggatttaaattggaaaaagagcgcaaattcaacgaggcactcaagaagtttgaggaatatgtagagaaacatccgaacaatgaggaggtgtgggcaaggatgggaaaattatattatgtggcagaaaatttggataaagcgaagattgctttggaaaatgccttgcttttacatcccggattgaatgaggctttatatgtttcggctcttctctatatcgatttaaaagattatcccaaagcattaaaatcggcagacggtatgctggcagagaataaattgtcagctgacggctggtatctgcgtgcattggtcttttacgaacagaagaaatatcaggaatctatcgttgctttaaaccgtttgctggctttccgtccgaaatatgataaagctcatatattggcaggagatattttcagagataccggcaatttcggaaaggcatatcaattgtatgaagtggcagcaaaagtggggaaggcggcatcttcttatgtgaaaatggcggatatgctggtaagacaaaaagagtattccaaggcaaatggtattctggaacagttgctcaaagctcaaccttcttattatccggtttataaagtgaaatgtagaatggcattgcaggaaggaaaaatggaggaggcgggtgaatatctgacaaaaatgaatgagctgaatgatgattctgagttgtatgtgttgcgttgtttgtattaccgaggcataaacgataccgtgaaagctgatttgatgttggagggtgctttaaaagtggatagcggcaatgttgaggcgttgaaattgaaacaagaaatgaattagatgatttatcccgatgagagcttgtatcgtaataccttgttataatgaagctgcacgtttgaaaaggagtgaatttacagcattccttcacgggacggcggatatggatttgtgttttgtaaatgacggaagtaaggataatagcgaagaagaattgagaaatctggtggcgacgatgcccgggcggatgtttttggtgagctatccggacaatcaggggaaagcagaagctgtgcggcggggaatgttgcacgttgccggtttgggcgtttatggagctgttgcctttgcggatgccgatctggcaactccattggaagaaataaaacggcttatcggtgtttttgtgcaggagaagcagacgattatggtgatgggctcgcgaatagagagaatgggaatcgttatacagcgtaaactttatcgtcatttcaccggtcggatttttgccggcattgtttcgttgatgttccgtttgaatgcttatgatacacaatgcggagctaaagtttttgcatctgatattatacaagaggcttttgctgagccgtttttatcacattggttgtttgatattgaaattttgcttcggttgcgtaacagccattcagattataaccatattattcatgagattccattagatgtgtgggtggagcagggggatagtaaaatacgtttttcccatttgctgaaaatgccgatgcagttgattaaaatttactttagatatagaaaataaaaaaagcagttaccgaaataactgcttttttctgtggtatcacctggaatcgaaccagggacacaaggattttcagtcctttgctctaccgactgagctatgacaccatcgtctgttttgcgagtgcaaatatagggcatttttgataaaacacaaaatatagagcgttttttttatctgtcaatgcattttttctttgaccttaatgccaggcaaaggtatatcatgagtatgataatggcgatagatgccactggtacagcaggttggcaaataatccaagcgggaatagcaacaactaggatactcatataaattttaagatagacggagataaaatgcggaatgtgtcttcttaaaataaaaatgagagccaagagattcaatggatttgcccataggatattccagttgggagctgtgataggatgtgccgtgaagcctccaaggaaaacgatcagaataccgacgattgctgaaaaaagaaacataatcaaggtgatgatgttgagcagccatgtgctttgggttttccataataagataatgattatcagtgaactaatgctgaatatgaaaatgggagtcaaataccagggggagattaattctctttgtggagcttcatagagaatctctacatcatcagccaagcgttgttgttggaaggtggctgtttttaatccatacataagatagtcgggcaggaacatgtattggagagtagttgcttcccgatttcctctttgccccagaatcgtatggatgccccattgtacccaaggggatgcatataggtattcatctaacagattccagaagtttttatgttggtcgattgtgttccagctgatttccgtagacagacttttttgcagaatgtcgcgactgcgtgtggtgcagttgtcaaataggaaattataaagataggtgcggttttccggtcggtaattctccaatagaaaattgaagagttgttgtttttgtagtgaatccaagcgtaaacgttgggagaaaatagagcgttcttcgtatctgtatgcatacataaaatgttcaaaggatgtgtgagtcagttgatatggcagtaatccctgtgcgaactttaaatagaaatgaggcgtttgaaaatcaaatgttccatagttgaatacttggtcaaaattagctgaggaatcttgcacccgtatggccgtgtggccgaatagtgaatataatcctgatcccggagagcatgtcaagatgctgatttctgcattgggggacagagtaaatgcctttcctgataaaaatgaggaaaggatgaaaagagaaagaatgatgattcgtttcataattctgttgttgtttcaatattagtggggtattcaatatcacagaggaaaagtgcatgaccggggacagaggttccggcattgcatcggtttttagattcgatgattgtgcgtaattcctgttcggtgatttttccttgtcctatttctaacatagtgccgacaatggcacgtaccatattacgtaaaaaacggttggctttgatagtaaatatcaattgtttgcccgtgtcttcccaatgagcctgcatgatggtacagttgtttgttttgacgtcggtgtgcaatttggaaaaacttgtaaaatcggtatagtcaaatagcactttacatgccttattcatgagatgaatgtccggtaggggatgtactttccatgcaaaggcacaggtgaacgggtctttttctttatttatataatatttgtatgttcgggatatagccgaaaaacgagcatgcatttccggagaaaccgaatagatgcgcgaaatggcaatgtctttcccggtcagtcggttgagtttgtatactagttgatcgatatgggggatatggatttcggtatcgaagtgtgcaatataaaacgatgcgtgtactccggtatctgtacgtccggccccaacaacacaaatgtcttggcggagcagtgtggacaatgctttattcagttcttcttgaattgtaggagctcccggctgaatctgccagccatggtagttgctgccattgtatgctaattcgataaaatatcttgacattgactcatagttttcgttgtgcgaagatagaaattaaagatgaatcggaaaagtgttctgtttttttgttaggatttgttattttgctatatatttgcaggataaaggttttattggagaataaggcttttgttattaaatgttggaagttatataaaaaatgagtattcaagaaaatattaaaaatatagtagcgacactcccggaaaaggtgtgtctggtggctgtttctaaaacaaaaccggttgaatatatagaagaagcgtatgcgggaggacagagggtattcggtgaaaatcggcctcaggaaatggctgcgaaacataaagtgttaccggctgatataaaatggcacatgatcggtcagctgcaggagaaaaatgtgaagtatatagcaccctttgtttcactgattcattccgttgacagcttgaaactgttgcagaaaatagaacgggaagcaacaaaaaatgagcgtgtgattgattgtttgcttgaattccgtatagcggaagaggaaacaaaatcgggcatgacagaggaggatgcagaggtattgttgtcaagcgaggagtataaaaaaatgtctcatgtccgtattgtaggagttatgggtgtcgcaacaaattctgacgataatgaaaaagttcgtttggaattccgtcatttgcatgatatttttgtacgtttgcgtgacaaatatttttgtaataacaaggatttttgcgaattgtccatgggcatgtccggcgattataagttagctgtggaagaaggaagtacgctggtacgtattggcagttctatttttggcgaaagagtttataataaataagaatcaacacataaactttatatagtatggcaaatttaaaaactagatttatcggcttggagttgcaaagtccgattattgcaagtagttgcggtttgactgtcgacttggggaaactggaagaaatggctgccaatggtgttggagcagtgattctgaagtcaatatttgaggagcagataaatagagaggcatcccatagtttgggtgatgggggatatccggaagcaacagattatatacagcactatatacgtgccaatactatccagcagtatatagatttcgtcaaaaaagcaaaagagaaattgaatattccggtgataggtagcatcagttgtctggatgatggcgaatggattaattttgcttgcgaattggaaaaagccggagtggatgctttggaattgaatgcctttattttgccgaccgatgaatttgttgaaagtgcaaaggtggaagcgctgtattatgcaattatcaagcatgtgaaatctgtggtgaatataccgattatcataaagatcagtccctattttacaaatttgccagcatttatcagtaaattgaaagcgtatggagccaatgctgtaacgatattcaatcgtttttatgagcctgatattgatattgaaaagatgacaatggggtcggcttctattttcagtacggaggcagaattgcgcaccactttaagatggacgggaattttgtgtggaaaggataagaaacttgagctttgtacgtctaccggagtgcattcaggtgaagcagctatcaaggtgctgttggcaggagcaggagctgttcaggtttgctctgttctgtatgaaaagggattgggaatgattagcactatgaatgaaacaatcagtaattggatgaataagaagggatttaagactattgatgagtttaggggtatgatgacttatgcggatgcggatcatgcagagcgttatgaaagagcgcagtttatgaaatattttagtaatcaaaaatagatatgaagtacattttattgtttgtggccttgtgctgttttgcttgcacgggagggaagtatgccggtgtgtcggaaaaataccatgtgttattggataaggcttttgaaaaagccgggaataatgcggttgaattggagaaagctttaaaagatgctcctgaaaaccaaaaagaggggatggcttttttaattgcgtatatgccagaaagggatttgcagagtttgaaagctgattttcttttggaaaatgcggcttatgcataccaggcacgtgaacagtttccatgggcaaaggctattcctgacagtgttttcttgaatgaagtgttgccgtatgttagtctgaatgaaaaacgtgagtcttggagaaaagaattttatgagcgtttcagtaaatatgtagcgaagtgtactaatattttcgaagcaatagattctgtgaatagaaatatccgtgatgaagttgttgtagactataatacgaagcgcgaaaaaccagatcaggctccgtttgagtctatgcgtcagcacatggcatcatgcaccggtttgtctatcttgttgacagacgctttccgtgctgtcggtattccttcacgtgttgcaggaactcctaattggcatgatgaacgtggaaaccataattggacagaagtatgggctgatggtaagtggtattttactgaatattatttccccggacaattggataacgcttggttttttgcagatgccggacaggcagtgaagaataatccggataaggcaatttatgcatcatcgttcaaacctacagggatttcgttcccgctcgtttgggatgaaaacatccgctatgtttatgctgaaaatgtaacagaccgatatacggatttatatcagaagcattattctgcaattgctaaagatggagatcatgttgctttgcgtgtgatggctttcaaggataaaaaacatgacaaacaatctgaagatcgcgtagcaacgaacttggatgtatttcacggtaagttgcaaatgggaggcggtcgtacagcaggtccgactcaggatatgaatgatgtgttaacttttatgttgaaaaagaatcagacatatacagttaactatgtttctgcaaccggcatgaagagtgttgaagtgaaattaaaagaaaaaacaaaggaattaaaactctatatggagtagtttaaattgctgatttataaaataatattctgtgcgggacctgttttaggtcccgttttttttaaaatatttctgtgttatagcgtattcgtgatgaaaatgttatctttgcatattgattcacgtgaaataaaattaaaatataagcatggctatagttttctatcagaaagacgcaacggtgtatgccgtacattatcagacgtctgagaatcctctagatgtaaataagttagaatggctgttcagtggtgcacgtaaagtgcaggcagaagagctggatggaacttttattggtcctcgtcgggaaatgataactccgtggagtacaaatgctgttgaaattactcagaatatgggtattgacggtatagtgcgaatagaggaatttatcaaaacgaacgatgagaaagcaggtttcgatccgatgttgcaagcttcctataagaaacttgatcaacaaatcttcatgatagataaacagccggaacctgtagtttatattaaggatattcaagaatataacaaacaggaaggattggctttaaatcctgatgaaattgcttatcttgaaggattggagaaaaaattaggacgtagtttgactgattcagaggtgttcggtttctcacaagtgaattcagaacattgccgtcacaagatttttaacggaacatttgtaatagacggtgaagaaaaagaaacttcattgtttaaattaataaagaaaacatcgcaagagaatccgaataggattgtatctgcttataaagataattgcgcatttattgaaggaccgaaagtggtgcagtttgctccacatacacatgataagcctgattattttgaaatgaaagatatcgatacggttatttcattgaaagcggaaacgcacaatttcccgacaactgtagaaccgtttaatggtgctgctacaggaagtggtggtgaaatccgtgaccgtattgcaggaggtcaggctgccttgccgttggctggtactgctgtgtatatgacttcttatcctcgtatggaagcctctcgtgcatgggaacagaaaattaatccgcgtaagtggttgtatcaaacaccggaggatattcttatcaaggcttctaatggtgcttctgattttggaaataaatttggtcagcctctgatttgtggctctttgttgacatttgagcacgaagaaaacggaaatacctatggctatgacaaggtaattatgcaggctggtggtataggttttggaaatcgtacacaggctttaaagaaaacaccggaagttggcgaaaaagtagtattgctgggaggtgataactaccgtatcggtatgggtggcggtgcagtgtcatctgtgaataccggtgtctatgctggtacaattgaattaaatgctgtacagcgctcgaatcctgaaatgcagaaacgtgtttgcaatgcaatccgtgcattggctgaaagtgatgaaaatccaattgtttctattcacgaccatggtgcgggcggtcatttgaactgtctttctgaattagtggaggaaactggcggtttgattcatatggaggaattgccggttggcgatccgacgttgtctgctaaagaaattgtcggtaatgagtcgcaagagcgtatgggactggtgatgaaagaaaaagatgttgcaatgttgcaacgtattgcagatcgtgaacgtgctcccatgtacgtgattggagaaacgacaggcgaccatcgttttacatttgaaaatgctaaaacgcatgagaaacctatcgatttggaattgaaagatatgttcggaaatcctccaaagacgataatggaggacaagactgtaaaggaaaaatatagcgatcttgaatattccgcagataaattagaggaatatttggaacaggtgttgcagattgaggctgtagcttgtaaagattggttgacaaataaggtagaccgttctatttctggtaaagtagtccgtcagcagtgtgtgggacctttgcacttgcctttgagtgatgctgctgcaatggcattggattataatggtcatcgcggtatagctacttctattggacatgctcctgtagctgctatggctaatgctccggcaggttctcgcctggcgattgcagaagctttgaccaacttggtatgggctcctattgagaaaggattgaaaggagtatctctttctgcaaactggatgtggccgtgccgcaatgaaggggaggatgcacgtttgtatcaggctgtacaggcagctagtgattttgccattgaattgggcgtaaatataccgactggtaaggattcgctttcaatgacccaaaagtatgatgataagaaagtgtatgcgccgggaactgtcattatatcaacagtaggagaggtgagtgatttccgaaagattgctgttcctgttttgaagaatgattctaatacagaaattgtatatatagatttttcatttgataagttaagattaggtggttctagctttgcccagattttaaataaggtaggaaaggatgtaccagatgttaaagatagtgcttattttgtagaggcatttactgctgttcagcagttggtatcagaaggtatggtacttgcaggtcacgatatttctgccggtggtatgattactgctttgttggaaatgtgttttgcagataatcgggcaggtatgaatgttgatttttctttcttggcagaaaaagatattatcaagattttgtttgctgaaaatcctggagtattgcttcagattaaggatgaagatgctcagaaagtttctgctatcttggaaaaagcaggcgtggcatatggtttcttgggtaaaccaggtaaggctggtaagttgaatatcaagaaagacggagcttcttggtcattggatattgcttctttgcgtgatttgtggtttaaaacatcatatttgttggaacgtcgtcaaagcggagaagtgaaagctttagagagatataaaaattataagcacaatgagttgaagtataaatttccgaaaggattcaccgggaaattatctgatcttgcattggatttaaatcgtaaatctaaatcaggaattcgtgctgctgtgatacgcgaaaaaggttgccagtgtgaacgtgaatcggcatgggcgcttcatttggccggatttgatgtgaaggatgtacacatgacagacttgattagcggacgagagacattggaagatgtaaatatgattgtttttgtgggtggattctctaattctgatgttttaggttctgctaaaggttgggccggtgcatttaagtttaatgagaaggcacgtgtagctttggaaaatttctataagcgtgaagacacattgagtttgggcatttgtaacggttgccaattaatggtagaattgggattaatttatccggagcatgctgaaatgccaaagatgttgcataatgattcacataaattagaatcaggatttgtgaatgtgactattcaaaatactaattcagtcttattgaaaacattggaaggagctcgattgggtgtttggattgctcatggtgaaggtaaattccagttaccttatgcggaaagcgagtattcaattgctttgaaatatagcaatgatgcatatccaggaaatccaaatggttcagcttatgctacagctggtattgtaagtaaagatggtcgccatttggcaatgatgcctcacttggagcgttctctttatccatggaactgggcttattatgcagaaggtcgtgaggaagatgaagtgagtccttggattgaagcattcataaatgctcgtaagtggatagaagaaaaagtaaaataaaacagccgcaaggctgcctgtgacgaatgaggttgcctgaaggcagcctcatttttttaataaaataagaatatggaattattgaaaaaacgtatacttgaggatggtaaatgttttcctggtggtatattgaaagttgatagttttatcaatcaccaaatggatccggtattgatgaagtcgattgctgtagaatttgtcagaagatttgctggagaccgatttaataaggtgatgaccattgaagctagtggaatagctcctgctattatggttgggtatttaatggagttgcctgtggtttttgcaaagaaaaagcagccgaagacaatggaaaatatgatatctacgactattcgttcttttacaaaggacagggaataccaggtctgtatcagtaaagattttctgactccagacgatagaattctttttatagatgattttttagctaatgggaatgctgctaatggtatgattgatttaatcgaccaagcaggagcagaattagtaggtatgggattcattattgagaaagcgtttcagaaaggaggagatttgttacgtagtcgttatgtgcatgttgagtcgttagctattattgatagtttggatgattgcagaattaaaattagagagtagccatggtaaatgaagaaattataaatagatcgatagaatttaggcgtcatttccatcgtttccctgaggtatcgactcaagagatagaaacgcaagcttacattatcaatatattgaaagagaatggtattgattataaaacttatgaaacaggtataattgccgttattggacaaggtgagccttgtgttgcaatacgtgcagatatggatgccttgtgggtacatgaagaaacaggattaccttatgcttcagagtatgaaggaaaaatgcatgcttgtggccatgatatgcacatggctatggtgctgggggctttgcttgctttgaaagaaatagaaaattctttgggaggaacgattaaagtactatttcaacccagtgaagaaaaacgccccggaggagcgcgtttattattgccgcatttattgaaagaacctgtaccgcaagcaatttttggacaacatgtttttcctggattacctgtcggtaaaataggtattcgttctggagctttttttgcatcttcagataatataatttttactattgaggggaaaggaactcatgctgctatgcctcagttaggctcggatccgatattggctgcagccgcattgattcaattttatcaaacgattataactaaattccgaaatccttttgagccggcagttttgtctattacctctattcatggcggcacagcaaataatgtgattcctgataaggtggaaatcaaggggaccgtacgtactcataatgatgcattgcgccatcatatctttgatttgataaatgaaaaatctcctgcaatatgtgatttgtatggatgccgttttgttcccaatatgccttggaatggacttcctcctttagtgaatactgcagaatggacagagttggtaaaagagtctgctattggagtagcggaagttgtagaattatctcctttgaccttgggtgaagattttgctatttatttagagaaattgccgggtgcattttggacattaggaatttgtcctccagagcaggatagtatgcctcctcttcacaatccgaaaatggctccagatgaaagagctatttcggttggaataggaatgttggtatctgtttgtaaacattttttacagcgtaggtgctaattattatatgtctttaagtcgaatgatattataagaaatgttacggtcgtaaacatctgtgtggtctatgcgttttacatatttcaccacatggattgtgaccggtaatataattacctcgtatattgattttaaacaagcttgggttccaatcattaccaatagttctgtgattggaattaacccaccgaatgcaatgggaaagaatattagcgaatcagcactttcacctataattgtagaagtaatagctcgcagggaaaaatatttaccttgggttgctattttcattttgctcatgatgtaagcgtttaaaaaagaaccaactagaaaagctaatagactagctatggctatacgtggagcaagtccgaatacaaaattaaaactatcttctcctttccaaaaaggtgctgccggtaacataatggctagtcgagcaaaaccaattacgaggaaattcataagaaaaccgctccaaataattagtcttgctttcttgaatccccatacttcagcaatacagtcattgatgatgtatgatattggaaatacaattaatccagctgttgctgttattggaccaagttgaacaacttttgtttctagaagattggatgcgacaaggcaaacattgaaaagaatccccataaacataaaggggagtgatatatttttttgcatatttcttgttttttacgtggtttgacaagcacacgcagcaggattattcctgccggaggattataggatgtaatcaatacatgcacgttcttctttaattggagcaatcatgttttttacaatagcttgatgtgctgggtgcatagcataagtatttaaagctgccatatcttcaacaatagcttctaaactaagatcccaatgttctgcaggattgatatttatacctacatgaatttcttttaattctttgatggtggcaggtaatttttctaattctgctttaatagcattcatttgatattccttgtctggtgataatttgaatttgaaaaatacaatgtgcttaatcattactatgagatttaattatttcacccggcaaagatagcaaaactcatggaataatgttcgcaatgtggaatgagaaaatctttttgaataaagtatgcgtttttttcttgacatacttgcttatataaaaaaaaagcatttactttgcactctgtttggaaagcgtttataaaaaatactgagagatgtcaagagtttgtcaaataaccggaaaaagagcaatgggtggtaaccatgtttctcactctaaaagaagagttaagagaacattttcaatcaacctattcaaaagaaatttctattggccagaagaagacagatggattcgcctgaatgtttcagccgatggtcttcgtttgattaacaaaaaaggtctgagtgcttgtttgaaacaagctacagaagctggattaattaaaactatttaaaatcactgacgatggcaaagaaaagtaaaggaaacagagtgcaagtgattcttgaatgtactgaacaaaaagaatccggcgtaccaggaatgtcacggtacattactaccaagaacagaaaaaatacacctgaaagattggaactgaaaaagtacaatccgtatctgaaaagagtaacgttacaccgcgaaattaaataattgaactatggcaaagaaagtagttgcaaccctgaaaaccggtgacggtagaggttatgcgaaagtaattaaaatggtaaagtctccgaagactggtgcctatactttcaaagaacaaatggtcactactgaccaggtaaaagaagccttgaagaaataagtatttctttatgaacataaaagatgcctttagaataaaaggcatcttttttttgtgttttacttgtatgtataaatatatgtttatatatttgtgccattaatataagagaatatggggaaaagatgttttacaaaagaagaattagagcaaattgcttatagcttaaaagcaattgcgcatcctaatcgattagccattatttgcttactatcgagaaatggcgaactaagtgtgtctgatatttgtgaacagacagagtgtagtcaggcattgatttctcatcatctaactgatatgtatgctaaaggtattctacagattcgtcgggagggaagaaatgctttttatcggttagctgacgatagagtgactaatgttatgcgttgtatgctcaaatgcaatgagtagaatagggattagtatttgctttcctattttattgcctatttatataaatgtatattttaatatttaaataataaataattagatactatgaaatacttgataattggtggagtggctggcggtgcatctactgcagcacgtttaaggagaatgaatgaacaagctgaaattattctttttgaaaagggtaagtatatatcgtatgcaaattgtgggctaccatattatattggaggagtgattgaagaacgtgaacgtctttttgtgcaaactccagtaagtttccatgcaagatttaatatagatgttcgtgtaggaagtgaagtaaagagaatagatgttgcacaaaaaacagttgaagtagttgaattaatttctggacgtacttactatgaaagttatgataagttagtcctttctcctggtgcagaacctgtgcgtcctcctttggaaggtattggtgaagaaggtatttttactcttcgtaatgtttctgatactgatagaataaaagaatgggctactaatcgccaagtaaagcgggcagtagttgttggagctggctttattggattggaaatggcggaaaatttgcatcagctgggaattcaagtgactgttgtagaaatggcagagcaagttatgactccagtagattttgagattgctgctaccgtacatcagcattttaaagaaaaaggggtcggtttattattgaaggaagctgttgcttcatttcataaaaattcggaaggattacaagttgccttaaaaagtggacgtaatcttcaagctgatttagttattctttctataggagtgcgtccggatattcgcttagctagagaagctggtttgagaattggagaactaggaggaatatgggtaaatgagtatttacagacttcagatcctagtatttatgcggtaggagatgcgattgaattcaaaaatccaattagcaaccattcttcgcttgcttttcttgcaggacctgcaaataagcaaggacgaatttgtgcagataatattgttaatggtaattgcagcatttataaaggagctattggtactgctattgcaaaagtatttgatttgacagtaggtgcttctgggttatcagcccgtatgcttgaaagattggaaattccttatttaacaactattattcatgcctcttctcatgcagaatattatccaaatgctttgcaattgaccattaaaattaatttttctccgaattctggacgtttactgggaggacaagtagttggttatgaaggtgcagataagcgtttggaaatgttagctgccgttattcgaaatgggggaagtatatatgatttgatggaattggaacaagcttatgcaccacctttttcttctgctaaggatccggttaatatggcaggatttgtggctgataatatcattcatgagcgtgtaaaaagtatcagttggagagaattgcaagccatggataaaaataaaattactcttataaatgtgtgtactaaggacgagtgtgctcttaatacaataaaaggatccgtcaacattcctttagatgaaatacgtagccattggggtgaaattccgacagataagccggttgttgtattttgtgctgttggattacgtggctacatagcatcaagggttttgacacagcatggatatgatgtttataatttgacaggaggtttaaagacttatgctctctctacggcagagcaatgttctgagccttataacaatgagccgacaactaaggctgcagataattccaatcaatcaattcgccaaatttctgttgatgcttgtggattgcaatgtcctggtccagtgatgaaattgaaatctggaattgaagggttggctattggagaacggttgcaaattagggcaacagatgcaggttttgctagagatgttgaatcttgggctaaaatgactggcaataaattggtttctttgtctcgtgagaaaggaattattacagctttattggaaaaaggaggtgaggctgcttgcaatcctactctgaaaaaagcagatggcaagacaattgtagttttcaataatgatttagataaagcactggcatcatttgtaatagctaatggagcagcttctactgggcgtaaagtgactatgttctttactttttgggggttaaatgtcataaaacgtaaacctattatacctgtgaaaaaagattttatgggtaagatgtttgggatgatgttgccatcaagtagtcgtaaactgaaattatcaaaaatgaatatgatgggaatagggtctcgtatgatgcgtggaataatgaggaaaaagcaaatagactccttagagagcttgatagaacaggccagtcaaaatggagttgaatttattgcttgccagatgtcaatggatgtgatgggaataaaagcagaagaattattggatggcgtgcgtgtaggaggtgttgcaacctatttggaaagagcagaggatgcaaatgtgaatctttttatttgataatttggtatattcaatttatgtagcggtcgatctttttttaggtcggccgataatattgcatagcatattgattatctgtaaattaacttaaataaccttgtgatttgtagatggtctttttgttaaaaaatatcaaatgaaccattatgaacttgatggacactattatatttcctctctttgctcaaaaattaagttcacaaggcaaaaaaggtttaaaggatataattgggtagaaatttctaatattgaaaataagaataatagtaaaattgaaagtgtgaaatcgtagaaaaatgagtagttctttgaatagccatatttgtgagtgtgaaattattgatttatggtattcgaaaaatgagggtcggaggagggttattcatgattttcaagcagtattggaagcaatatagcttaagattgtgataatagaacaagtaaaaagcggagagctattcatctccgctttttctaatttcatctttatttttgtttattttaaatgtatgaaaagtgcctttcaaaagatctataagcaatagttttccacttaaggtatcttgtctatccaaaatgattttaatcgtttcagaagcttgtatggagccaataacgccaggtaaggctccaattacacctaagggttgtttgaagtctgcaacatctttatgataagggtacaaatcgcggtaatttgggccttctttgtaattgaaaacagatacttgaccttcaaattcgcagatactaccatacacaaatggctttccggtatggatacaagcatcattaatggtatagcgggaaagtaaattatctgttgcatctaccaccacgtcataattggctataatatcatctgcattggatgccgtcaggcgtttttgcatgacgaaaatctcacacattggattcagtgcttgtaatttacgagatgcaacttcaacttttggttgaccaacggaattagagtcatacaatatctgtcgttggagattgctttctgatacaatatcatcatccaatattccgatagttcctactcctgctgcacataaatataatagggccggagaacctaatcctccggcgcccactactaatactttagcattacaaatgatttcttggcctttttctccaacttcttttaaaatggtatggcgtgtatatcgttcactcgctagatgttccatattaggtttattgtttgaaattatagccaattgtcccagtctttccatacaggttcataacctcttgcttggatggctgcagccacttctgccggggttcgttcgtcgctgatatggaattgttccaatgcttgtggatgtgtgcagtaacctccgggctctgtttttgaaccggcactcatagaagttactcccagaggcaagatattgtctcggaaattagaactttcgcgagttgaaattgaaatatctacatcatggtcaaagatacggaaggcaaaaattaattgcgcaagttcgcggtcttctaagataacattgggctgaaaatggccttcagatggacgcatacgtggaaaattcacgctatatttggtttgccaataagtacgctgcagataacgtaaatgacgagccatcatcgttacgtctgtacgccaatcttcaagaccgattaaaacacccatacctatcttgtgtacattggcttgccccatacggtcaaatccatttagccgccattcaaatttagacttcattcccttggggtgatatacgttgtagcgggctcggttataagtctcctgaaaacatactacaccatgtaatcctgcatgggtaagacgttcatattcttctgctttaagcggcatcacttcaattgtaagattagcaaataaaggatgtgctaattgcaacgctctttctaggtaatctactccggcatcccttggattttctcctgtaactatcaaaagattttcaaaattacccagttttttgatagcgtgaagttcattcacgatttcttcttcgtttagaattgtgcgttgaaaaggattatcgtgattaaaaccacagtacacacagaagttggtgcatgagttggtaatatagagtggaatatacaacgacatcgtttttccgaagcgttgtaaagtgtatttttgactcaaagctgccattggttcaagatatttggcggcagctggcgatacgagtgccatgaagtcatctatatccggatggctttttcctaaggcgatttcaacgtctgcagcagtctttgaatagatttgcttggttgtatcttcccaggaatactggtctaattcttctgaaaacatattgtaatttctctttcaatttttatcgtttatcctaaaaatgcagtcaatgggctactagcttcagctgtatagcttctgcctgctaatccggcttcataagccatgcgacctgcttcaacggcaatcttgaaagcttttgccatttcgatgggattgtctgcgacggctattgctgtgttaaccaacacggcgtctgcgcccatttccattgcttctgctgcatgactaggtgcaccgattcctgcgtcaacgacaacgggtatattgctctgttcaataatgatgcgaaggaattctcgagtttgcaatccttggtttgtaccgataggggctcctaaaggcatcactgtggctgctcctgcgttttccaagcgcttgcacaacaccggatctgcttggcaatagggaagtacgatgaagcccattttagccaattcttctgtagctttcaaggtctctattggatctggcagcaaatagcggggatcaggatgtatttcaagtttcagccagttagttccgaaagcttctcgtgctaactgtgcggcaaaaatagcttcttttgcatcgcgaacaccggatgtattggggagcaactgaatgcccggttgtaaaatatgatgtagcatatcatcattcttatcttcggtgcggatacgtttcatggcgacagtcaccatttggctgccggatgctgcgatagcttcttgcattttttcattagaagcgaatttgcctgtacctgtaaaaaggcgtgaggtgaaagtcttgtctgctatttttaaaggtttcatatgaattgattttttgagttattctttatttgaagtattaattaatgatataatatcttctgttttgatagttagattattactatttttaatcaagccggatatggctatcccttggattcctgttttcattaaggaaggaatatcacgttcggttattcctccaatagcgaaaacggggatgtcaatatcattttcctgcatctgttttacaagccgttgatagccttccaaacctaataccggactgaggcgttctttggtagttgtaaaagtataggggcccagaccgatgtagtccactcgttgttcttggcgcaacataatgtcttcccaggtattgcaggtagctccaacgattttgttttcaccaagtataactcttgcctgcaaaggattcatatcttctttcccgaggtgtatgccgtctgcatccaattgtcgcgccacttctacattatcattgataatgaataaagcattatacttgtggcagatttctttcacaatttttcctgtctgtaggaattcctctgtagaggatcctttcatacggagttgcacccagcgcatgcctccgcggcatacggcttccacttgttcgcaaagagacataccatctttgggagcagtgatatattgtactgataactcacatggagtggggcgtgatattgtattcattttatgaagtgtatgataacctaatagactgtcattgctatcaataacctgcgatacataaagctgtgcttcactgcttgcttgttcaagagattctcctttggcaaggtgtgcgagcagtgcagatgagagaatgcatccggtgccgtgtttggtatacctgcttttttgtagagagtggcaatagattgcatccggtgtaatcaattggtctgttgtgattgctccagaattatgcccacctttccaaagaatgttgacattgttattcgttgcaatttgttgcagcatttctgtatttacgttatctccaaaaagatgatgtaattcttcggtattgggagttatcaaaaaaatgtcattcaatactttttgcaaatgctcttgtagattttggtgaaatacatggccggcactggcttttaaaataggatcccagactatttttacatcaggaatttgttttttgagccaaatgacaagatgctgtagcacatcaagatcttgtatcaaaccgattttgacaaattctggtcggtgatgttggaataacaattcacattggcgaataatttctgccagagtcatccagtgtgtaccactataggtatcctcgttttgaaaggtgacagcagtacaaacgcccattccgtagcattcattagcttcaaacgtctttaagtcggctgttacaccggcccctgatgaagggtcgaaaccggcaatgcttaaaacgaatggtgtgttcagccgtgtaaagcggcgagttgcttcttccggatattcccaaatataacctaaggcagcgataccgctaaaaccggcttctcgacataaatctcttttttctggagtaataccgccgagtgctataatagggatattgatttctgacaaatccggcagttcttcaaaatggctttggtaaccttgtttggaaatactgtcaaatatcggactcagaaagcagtattctgcacggaagggcaatgtctttatctcttcgacactatggcacgaaatactgactttcatgttagaatactttccatagcgagtagcttgccctgacttcaggtgaatcccccgtaagtgatattgctttgccaattcgtaatggtcatgcacaacgattctattgcggtagcgtgattcgatctgttgtataaaattctcataggtgaaaatatctgcacctggtttgcgcaggtgcagtatttccaatccttgggcgaacagaagattacagactaccgtttcgtcttttactttttcgggagatgtaatgacaataaccttcatatcaagttactgaataaccgctggggttattctttgttattaattttttctcgcaattttttgctggcacgcatggagcagaaatgttccccacacatggagcagaaatgtgcttctttatgtccttcatctggcagagtttcatcatgaaatttgatggctttttcagaatccaatgctaaatggaattgatctttccatctgaattcaaaacgagccttgctcatggcatagtcacggaaataagctgccggatgtccttttgccaagtctgctgcatgggctgccagtttgaatgtgatcactccttcttttacgtcatcgcggtttggtagaccaaggtgctctttctgggttacatagcatagcatggctgttccgaaccagccgatcatagcgcctccgatagctgaagtgatgtggtcgtatcccggagcaacatctgtcaccaacggtccgagagtgtagaatggcgcttcatggcaatatttcaattgcaagtccatgttctctttgattttgtgcataggcacatgccccggaccttcgataattgcttgtacattgtgtttccaggcaatttcacaaagttcgcccaaggttttcagctcttcgatttgtgctgtatcgttagcatcggcaatgcatcccggacgcaatccgtctcctaaagaaatacctacatcatatttagccaggatttcgcaaatctcttcaaaatgttcatagataaaactttcctgtttgtgggttgtacaccaatgcgccatgattgaaccgcctcgtgatacgatgcctgtcaggcgtttcaatgtcaggggtacatgtttccaacgtaatccggcatggatagtgaaatagtcaacgccctgttctgcctgttcgatcaatgtatcgcggaaaatctcccaattcagtttttctacgtcgccgcccactttttccaaggtctggtataagggtacagtgcctacgggtacaggagagttgcggataatccattcacgggtttcgtggatattcttaccggtagagagatccatgatggtatctgcaccccagcggaaagcccaaacagctttctcaacctcttcggcgatagaagaggtgacaggagaattgccgatattggcattgattttcaccaaaaagttacggccgataatcatcggttcgcattccgggtggttgatatttgaaggaatgattgcacgtccggcagccacttcgtcacggacaaattccggagtgatatagtctggaatgtgagcaccgaaggagtcgcctttttcttttttatatttttcccgaatttggtctgccaattgattttctcggatggcaatatattccatttccggagtgacaataccttggcgggcataatataattgggtcacctgtttgccttcttgagcaacgcggggagtagtattcacatgctcgaatcgcagagagtccagtgaagcatctgcttggcgcatacggccgtattcagaacttaagccttcgagttttacggtatcttggcgttcctcaatccagttctctcggagtttgggcaatcctttttgcaaatccactgtataagtcgggtcggtatatggaccggaggtatcatatactacaacatcctcattttctactttattgccgtccaaatcaatcgtcggcgacattttaattttacgcatcggtacacgcatgtcgctgcgagaacctgttacgtatattttttcagaaccgggtaggggtccaacagtaacactaaatttttccatagtatattgatttaagaaattacagatagaattgtttatccgccttgtacggctttgatgatgataatacggctaccgtcctggagcacggtcgtatcccaatttgcttttgaaacaacagcatcgtcaattgctacggctatgtttaccggttgaatttcttgttgggcaagcaactgggtaatagtaatgttttccggacactcacttggaatgtcattgataaatatttgcatgatttttccttgtttagtttatggattatccaaggagagcatgtatagatgacggtatgtcggaatgattactcttttctccctacgccggcattacccggatcaggttctagggtatgatctcagcccgtagtcttaaggcaccccttttgattaaatccgtaacaaagataaacaaaaatgttgaatattccaagtgaaaaaatgttctagtgcaaaggttctcatttccgccattgcagtatcaggaaaatcaatccgggcacaaagataatcaaggctgtaatctgaagcgcaaaagccagggaaaaacagtcattcagccagccaatgaaaggagccatgactgcgaatatcaaccggatgatgaaatttctgattgagagtactgttgcccgcatttccgaaaaggtctggcggttgatatatccttttaatataggagtggcaaatccgcgcacgatgtaaaataaaaacaggatacccaaagctgcataagtaagattcaatgaggttgcgatatagccgccggtaataaacaccaatatcaacgtatatgttttgttttctcccaggcgggcacttaaagcatcggagtacagagctgcgatgcctaccactaaattcagtacggtccatacgatgccgaacaggctggtcggcagctcgatgctcatcagcaccggttgtacaaaccaggccattgtgagggtagaggccccgatgataccggaaaacaggatgtcgtaccttaggcttttgttctccatcaatgaataatgcaggatatgcaggatgtttttcacgggattgacaatatgtacttgtgcattaaattctttcaatgccaaggctgccggaataccgataaatgcaattcccgtctgaaaatagaaaggcagtcggagagaagcagctgccaatagaccgccgaatacaccggcgaaggcctccgagaaatttccaaccatggtcacctttccttcatactttaaatattccttttcccgattgtagtggagcatggtgtcataaagcaaggccgagtctgcaccagatacaaggctttgtccgattccaagcaacacttctgccaataaaaaagctccaaacgtatatgaaaatgagtaggtgacaaagccaccgaaagcaatcagacaaccggtcagcaagcatttttttctcccccaagcgtcagccaggtagcctgtcggaatgtctaatgacaccgatacgatggagtaaacgctttttaaaagaaaaatctcttttaatcccaaaccgttatcctcataaaacaggacaataatcggcataatcaaggtaaaccatttggataccttgatgagatagagtgcattaatatttttttgaagtgtgttcaatgctactttaatttagcgtttgcaaaggtaataaaaagtaattctaaaagaaaagattgcacaatgaggaatattttgtgaagcgatcttttgaatttgaattataatatgtatttttgtttcaacttataatcaaataataggtaaaatcatgaaaattgaaaagattagcgatatctatgaagtattgaaaggaaacaccactaaaaaacgcttggtggtagcctatgcaaatgacagtcattcaattgaagctgtatccttggcagtaaaagccggactggttgaaggtattcttgttggcgattcagaagttatcaagcaggtgtgcgccgaaaacgattacgatcccacttgttttaaaatcgttcacgaaccgaacgacgtgaaagcagcagaaactgcagtagctatgattcgcaacggtgaggctgatgtattgatgaaaggacttgtcagcacagacaaatatatgcgtgctatcttgaataaggagaaaggtatcgtaagtgaaaaagtgctttctcacgttactgtaatggagtgcccggcataccacaaattattggtggtaagtgatgtggctattatcccatgtccggatttagaccagaaaaaagctattatcaaatacgtaactaaaacagccgttaagttgggtgtagaaaaaccgaaaattgcgttgattaccccgaccgagcaggtgttgccgaaagtacagtctactgtagaggctgctattttggccaagatgaacgaacgcggacagattccgggtgctattatcgaaggtccgatggcattggatgtggcaatcgataaagaagctgctgatattaagaaaatctattctccggtggctggagatgctgactgtctggtattcccgaaccttgaatccggtaacgtattctacaaaaccaatacaaaactgggtagcgctaaattgggtgccatgttgatgggagctaaagttccttgcgtattgtcttccagaggcgacagtgtagagacaaaattgaattccattgcattggcagctttgattgcttaaaggcttatgaatgcagtataaataaaaaggttggaaatgctcttgcgtttccaaccttttttatctgtttgctaaccgatgaagaatgattatagttgtccggcttctgctttcttgatcatctcttcgtttgcactgatataaatctctacacggcggttttgtgcacgcccggcagctgtgctgttatctgctaccggctggtcatatgccattcctttggtggtaagacgtgctctgctcactccctgattaaccagataattggctaccgtattggctctttcgcctgaaattcttacattcacttcgtaagttccggtgttgtcggtgtgtccgtaaatagttacgtctgtatccggagagtttttcagtgaattggcaaacttagtcaacgattcgcgggcagaagcattcagactggtctgattgtgttcaaaaaggattccattgtcgaaagtgactttgatagcctgtaaattgttggcatccttgatgctttctacttttgccccttcaattgcctccaattcctttttctgtttgtccatacggcggccgattaaagctccggttcccgaaccgatggcagtaccgatagcagcaccgatggcagcccctttacccttgccgataattgcaccgatacctgctccgacagcagcaccgctaccgcctccgattaaagctcctttgccggtattgttcatacttgcacaacctgaaaacaggcattctgaaaatataatgcttcctccaagcatgcagactgtgattaaatttctcgctttcatttcgttttacaattagttttttatgagtgtcaattaatcctaattaggcaaatgtagcaataatctttaaaatgactaatttatttcttccgtttttagtacttttgtcagtatttattggcaatcatataatttgaaataatataattatctatggcagtttattttatcagcggcattgatacagatgccggaaaatccattgcgacaggggtattggcgcgtacattgtcagccaaaggactgaaggtaatcactcagaagtttattcaaaccggttgtgtcggtatttccgaagatattctcaaacatcgtgaaatcatgggtatcccgtcgcaggaggtggataaggatggaaccacctgcccgtatgtgatgacttatcctgcttctccgcatctcgctgccgagattgataaagtggatatagatgtcaaacgaattcatcagtcaaccgaaaaactggcatccttgtatgatattgtattgctggaaggagccggaggattgtatgtaccggtgacccgtgattacctgaccattgattatattcaggaatacggtcatccgttgattttagtctcttcttccaaactgggtagtattaaccataccttgatgagtctggaattatgccgtttgcgtggcatcaatgtcagccatgtcatttataatgatttcccgaatgatagtgaatggattaaaaacgattccatcacgattatccgacaatatatcgaacgtcatttcccgaattgccggttattggaattgccggtaattcaaaatggagaatggtgtgaactggcaaatgtatccatagaaaaatagtagaaatccgataagaaaaaatatgaagagagtggaactgctgtctccggcaaaagacctgagtataggaattgctgccattaataatggggcagatgccgtatatatcggtgcgccggcattcggtgcgcgcaaagcagcctccaacagtctggaggatattgcacgattggtggaatatgcccaccgctattattgccgggtatttgtgaccttgaatactgttttgtatgatagtgaactggaggctgcagagaaaatgatacacgaactttaccggattggtgtcgatgctttgattgtccaggatatgggtatcttgcgcatggatttgccgccgatttgcttgcatgccagcactcagatgcataattatgatatcgagcgtatcaaatttatcgataaaatgggtttccggcgcattgtattggcgcgcgaactttcgttggagcagattcgtgaagtgcgtcgctccgtcaaggcagagttggaagtttttatccatggagctttatgcgtcagtctgagcggtcaatgctacctgtcccaatatatgttcggacgttcagccaatcggggagagtgtgcccagccgtgccggatgaaatggtccgtgcgggataactccggcaaacgtttggtggataaccgttacatcctgtcgttaaaggatttgaatctctcttcctacataaaggatttggtggatatcggggtcgattcatttaaaatagaagggcgtctgaaagatgaaaactatgtgtctaatgtgacaaatcactactcttcgttattgaattccattccgaatatcaggcgtaccggttccggtaaggtgatttccggttttcatgccgaaccggagcgaagtttcaatcggggttactcttcttattttatggtgaagcgggaatccggtcttgtcaatgccgacacacccaagtctatgggtaagcaaatagggaaggtgttgcaggtgaaaggcaaccggatgcaagttcaagcgattgaagccatcaataatggagacgggttgtgctatctgcaaaatggcgaattgaaaggcattcgggtgaacacagtcgatggtagttggcttacctgcaatgagcgggcagaagtaaaacctggcgcaactcttttccgtaattacgaccatcggtttgttactcagttggaaaaagctaaatcagtacgcaaaattcggatacacatggaagtcagggtacagcaggctcgcctgtacctgtcggtttgtgatgaagacggtataactgccgatttgatatcagaagacgtatttgaaacagcctccaatcctcagcaaaaggaacgcttgctgcagcaattgatgaaatgtggcgacactgaatatgtatgtgaatcggtggattatttgagcgaagaaattctttttgtaccggcagcagcggctaatttgttgcgcagggcattgctcgaccgcttgacagccatccgtgccgaaagtcgtgaggtgatgcttccgggcaaagaagatactgacgttgcctatccgttattggccgattggcatttgaatgtagtcaatcaaaaggctgcagagttttatcacgaccatcaggttgagacggttgctaccggttttgaaaaaagtaagaccggttccggtcgcgatctgatgcatacgcgctattgtattctccatgaattgggtcgttgtcgcaagaagaataaaaatgccgatttggaatttccgttatggctttataacgataaacattgcttccggctcgactttgattgtaaagaatgttttatgagaatcctggagaaagaataaaattttactttgtaaaatatggttttgaaaatacatacgattctataattatcagagtgttctgtaataaaaaactttataaaaatatctttttggtgagcagattatttctttgcaaattatatttttgcgggcgtaattaatttgtaaactaaaaaatatgtgtggaattgtaggttatttaggtaacagagatgcctatgcgattcttataaaaggactgcatagattagagtatagaggatatgacagtgcaggggtggccatgctctccgggacaggagcactcaatgtatataaatccaaaggtaaggtggcagatttggaacggtttgcccaatcaaaagatatttcaggttctgtcggtatagcgcatacacgctgggccactcacggcgaacccaacgatgtaaatgcccatccccattactctccctccggagaattggcattgatacataacggtattatcgagaactatagtgtgattcgtgccgagttggagcgtaaaggatatgaatttcgcagcagtacggatacggaggtgattgtatatctcatcgaatacatcatgaaaaccaatcagacagacctttgtactgccgtgcaactggccttgcagcaggtcgttggagcttatgccattgctgtgatttccaaggacaacccggatcagataattgcagcccgtaaaagcagcccgcttgttgtgggaatcggcgatgatgaattctttttggcttctgatgcgacacctattatcgaatatacggatcaggttgtttatctgaacgacgaagaaatagctattatccgtcggggagaggcattgaaagtggtcaatctgaataatgtggagattacgccggaggtaaagaaattggctatgaatctcagtcaactggagaagggtggctatcctcatttcatgctgaaagagatttatgaacagccccggactattttaaattgcaccagtgggcgcatcaatgtcgagggaacccaggttgtcctgtcgggagtgattgacaataaggagaagtttttaaatgccaaacggattgttattgtagcttgtggcacctcttggcatgcagccttgattggcgagcatctgattgaagatttttgccgcataccggtggaagtggaatatgcttcggagttccgttatcgcaacccggtgattcattccgatgacattgtcattgccatttcccaatccggagagacagccgacacattggctgctgtcgaattggcaaaatcaaagggtgcttttatctatggaatctgcaatgctgtcggatcgtctatcccaagggctacggattccggttcgtatatccatgtggggccggaaatcggggtggcatccacaaaggcatttaccggtcaggtgacggtattgtccatgctggctttgactattgcccgccagaaaggcaccctttcagaggaagaatttatccgtctggtgaaagaattacaagccattccggaaaagatagagaaggtgttaaagcgggcagaggaggtaaaggagctttccaagatattcacctatgcacacaactttatttatttggggcgcggctacaattatccggcagctttagagggtgctctcaagttgaaagaaatatcctacatccatgccgaaggttatccggcagccgaaatgaaacacgggcctatagccttgattgatgcagaaatgccggtcgtagccattgccaccgccgatagcatttatgaaaagacaatcagcaatatacaggaaatcaaagcacgcaaagggagagtcatagccatcgtgacagaaggagataaaatggtgcgggaaatggccgactattgcattgaagtgcctccggttgccgagccgtttgctcctgtattggtctcaatacctttgcagttattggcttactacattgcagtcaacaagggacgcgatgtcgaccagccaaggaatttggcaaagtccgtcaccgtagagtgacggactccggttattcggtgataacggcggtctgtttccgtccgtccatataaatcgtaacgggttcctggaaacggacgtgctttacaaattctgtttcttccaccagctcctggcgtcggataatatcgtaattgataaacgaattgtccgaatcgtaggggatggcaaaatagccgacattcatggaggtcacattatggaagaaatgcgagcccagcgaagcatccagcggaaaatctttcagtccctgttccacgataaccttggctttggaaatgtccgaccataatacaggaataccggtcaatcggtctcgggtgccccagcgtccgggaccgattagtatatagggagtatcattggaggccatctgctcgttgaaatgtttcacctcttcagccatctgttctgttttcaggtaattgaacttatccggatcgacatagacaatatcccggatattggtcagtttgccgttgcccatacctttgttggctttcaatacagctttgtccatatcaatttcttccgtgtctatatccaggttatactcgtttttgatgagcggtttaatctgcagcacatagaaaatccattccccgttttcgcggttgactgaaaattccatttccacaggcgaccccattgcctgcgagaaaatatccagcagcgtatccagcgtggaagccaacggaatataatcatattgcagtatattcgggaaattgacgatgcgtgcgcccatgacgttaaagtcataggtgatattatcgttcataaagtcgtagacagaagcacaatgcgtcaggttcccatcctcttcaattgtcttcaaatcgtatgctttgatggctgcatcctcaccgtcatgttccagattgtatgccttgtttttcaaatcgatggcataaaaatacttttgagaatcgcgcatcatgtcctgaatagaagccagttgaagcttgggataacggggacagaagcggtaggtcttttcgcctcccacaacgtatgcccccaaccctaaggcaagcacggcaaacccgtcctccggcttgatataggaaaacggatagaagttgtacgactgtgccactccgctgatattggggtaatatttgccgtcgtattcattaccgaccacctcctggatgatgaccgccatcttctcttcttcaatcatactgccaatggcacggaaataggctctagacccttctgtgaagatagaagagaataccagcttgatggctttttccaattccaatgctcttcgcactatatccgcatcattgtttggtatcagataagtggaataaacccctgcaaaaggttggctaagcgagtcctcaaacaagccggaagagcgcacagccagcggctttttcatcacctccagataatttcttaatttctccttcaagcagggcgttaactcagcctgtataaatgcctcttttatttcctcatagctcttgtcgctataagcaatttcgctcagattattgttgtcgataaaatggtcgaattcatccactccgataatcgctgttttgggaatggctatcgggaggttgggtatcagttttttaaagtccacattctcaataaaattcgacaagaatgccattccgcgtcccttgccgccaaacgaacctttgccgaggcgggagatatatcggttggaatctaccagtttcgggttgaaattgatgattcttcccttgatttttttcaactctgcactttcaatcgcatgtacgataaactgcctgatttcttcaggagtcttaaaatcctcccaacgataacgacgtaaatggcgggcaagtgtgatttctcgtcttgccatcagccaggtagagataccgtttcggacagagtggtagagcagcgactcatccggaatacttaacagcttctccttgaactcttcaatggacgttgctttatcaatttcttcacctttggcattgcggaaaataaaatccccgaatcccagataattcttgataaaagcctggatatcgtgtgccaatgtaggagaattcttattgataaatgcagcatgcagagcttccgccttggcagcattctcctcttcctggctttgcagcatacaggggataccgccgcctgtctctttgacatagcggatcaacgaaatacccgcttcctcatcctcaaccccgccgcgtttatacctgacatccgaaatcacgccgatcagattttcccggtagcggtcaatcacctccacggcttcctcataggttgtggccagaatcaccttaggtcttgcgcgaatcgtcatcacggtattcatatcccgatcctgcggttctgaataaatcagttcctgggtctgagccatcacctccgtatagagcagcggcaggtagcgagagtaataacgtacagaattttccacaagcaggataattcggatgtctcccaggcgggtatctttttccagatttttcttgtcctcgatacatttcgacatggcgagaaaaatctttgtcgagccgttccatacgaaaagctgttccaccgactgatagagctgttcttcaatcgtatgaaaataggcaaggtcggcattattgttcaccagcatcagttggcacacctccggataaagctccttgagatgccggctcacattcaccggcgtctgcttgtcaagtcctgccataatgataatcaaatcgatgtggcgttccttcaacaccttcagagcctcctcttcgctggctacagccgtgaagcgaggggcggtatagagattcacctgcagataggcccctgcaattttatctgtaaactgtccttcccgttcgatggtataggcgtcataataattggcaatcagcaggatttccttgattttaaaaggcatcaactcctgaaagatatctcggtcactcttttgtcttttgtagattttgtgcagttctatagccatatcgaaaattattttaaacccaatcaaatatacaacatccgggagcgtttgtcaataggtagcttcaaaaaaatcttgactttttatcatctccccggtttatccgttcctccctcgttgcttctccgtagctcccggcttctcgttcggatgagcttcggaggaacttcggataagaaacggagaacagtgagaggggagtgagacatcagtgagacctggatgggaggcaatacagggatttttttaaggaatatcctgcaattttagattaatactaatatctttgtgttgtgtatatactaataacactacaccatgtaaatactaataatcccccaattgtatatactaattgattccataacctagtactaataaaagtcccatcaatgcccgtatactcgggcatttcttctttgtatatatccacccttatatggatggtaacggacgtacagcccgtttcatcatgaatacgatgttggtgacaggggggtattcatggcgggttattacggtggatgagcgctctgcatatatggaagctctggaaaaggcaagcatcgagggagacatcacttcatttgcaagaattgttctcctctgaaaaaagttggcttttactgcttcatgcggataataagccgcaaattttgcggttaattatccacaaaatcgtatatttgcagaaaacaatgatgcctatgtatatatatgaatataaagaatggccttccttttcgtggaacaaagaacttattggcgagaaactgaacaaggtaaacaaggctgtcggttatttgatgggacgcctcagtgtaatcggttttaacgataagatggctgccgtggttgaatccatatcccatgatatcattgcatcatcagaaattgaaggtgtggaattgaacaatgagcaggtacgttcatctgtagcacgcaaacttggagtgctattaccgaatccgacagattcttctcgttatatagacggagtagttgaaatggcacttgacgcaaccgttaatttcaacattccgcttacccatgaaagactcttcggctggcacaattgtctgtttcctaccggatggagcggtccaatcaaaattgatgtagcccgataccgcagtggagagatgaaggttatttccggaatgttcggtcgggaaaaggttcattatgtagcacctcctcctaaaaaaataaacgaagaaatgaatcggtttctggactggttcaattcagatgcacataatggctatgtaaaatcggcaatagcccatttgtggtttgtctgtattcatccttttgatgacggaaacggacgagtaggacgggccattgctgatatggcactttcacaggcagaaaactcaaagatgcgtttctttagtatctctcatcagataaacaaggataaaaagcagtattacgacatattggagaaaacacaaaaaggggattgcgagattacagaatggatcgtctggtatcttgattgtctgctccgttccatcgagcaatccgatgaaaccttgtcgaaggttcttaacaaggctatattctggcagactcatgccgaaatagtcctgtctgaacgacaacgtgaagtcttgaatttatatttggatggttgtcccggaaaactaacggctaagaactgggcaaaacgtgtaaaggtatcaccagatacagcaatacgcgatataaaagatctggtagagaagggtgttctgatacctcagcaggggcgggttcgtgacgtattctacggcatacggtgcagtgactctatacttgttattcccttgcctgaagatttatgattattaaaaaatcgttgtatggtggataagctaacaaaagaacaaagacaccgttgtatgtcagcaatcaaagggaaagggacaaaacctgaattgctggtgcgcaaattcttgttcagccgtggattccggtacaggctcaatcatccacggcttcctggacatccggatattgtattgcgtaaatatagaacggtggtttttgtaaacggttgcttttggcatggacatgaaggttgcaaatattacgttcttcccaagacgaacgttgagttttggcaaaagaaaatagaaaggaaccgggatagggatttagaggaacgacagcaattgtcttctatgggatggcattgtattactgtatgggaatgtcagctaaagccgaaagccagacagcaaacattagagtctttagaaaatatgctttatcgaattttcctgaaaaatcgagagatcaagcgatatgatgttggtgaagagaaaaattctatggtggcagaaaatgctgaggattatgaatactatgcatccaataatcactgataaaagcattcgctttcagataactttaaaagcaagaagtgttattacttttttgttttttattcgtgcgtagattcaaaataatatgagatttaattcgtacttttgcatattaatcgttattcaaaaagtgtgcagatactaatctgtcagatttttttatgatttatgcaaatagctagattactggatgttgaatcagcttgtttggtgcaattggacgaaattaataaaaaatggaattagataaaagagagattttattggaacaagttaaagagcaggagaaagacatcaatgtttatacagccaactttaatgaagaagacattgctgatgaagtaaacttcttgcatatagtgaaacagaatttggaagagtggtcaaataagtcataatatatctatagaatgaaacattcacaactaaaaatggttgatttgtttgcgggatgtggaggactcagttgtggattggagcaggctgggtttactccatggttcgtaaacgaaatcgttgatactttttgcaatacgtataaaaagaaccattcattaccggacagtcattattttgttggtgatataaacgaactgaacgaaaatatagataaatacaaggagttgcttaccgatataacacttgtttgtggaggacctccatgccagggtttttcaatggcgaacagacaaaggatattggatgatcctcgtaatcagctttacaaggcatacttaacctttcttagtacagttcgtccaaaattcttcattatggagaatgtaaaggggatggcaaacaagattgatgaaataaaacaaaatttcacagaatatcttggaaaagagtatgtctttgattataaacttctcagagcacaggattttggtgtgccgcagaatcgtgaaagatttatccttatcggtaatagaatgggggtgagtccggagttgatttttgaagaaatagccaaacataaaagaactcctttcgtactacgggatgctttggaaggactaccgcatttggaagctaaaaaggttaaaggcgcgaaagacatagaaaatgaattatccggattcactgtaagggattttgagtaccctaatacggatttttatcggttcatcaatggagataaggttatacataaactttataatcacaagaacagatacaataatgaacgtgacatagagatttatcgacggcttccgcagggggccaactctttgcacgaatctataactgatataatgccgtacaaaagaagaaatgatatttttaaggataaatacttcaaattggatgaaacgcaaatttgcaagacaatcacttcacacatgaagttcgattgcaatatgtatattcacccatgggaggctcgtggtcttagtccaagggaagcagctagaatccaaacatttccagatgactacatacttacaggcgcacagaatcaatggtatgcgcaagtgggtaacgctgtaccagtaaagttggctaaggccatcggtgatggcataatgaaatttataaaagactagaatgaagcatttagaattatttgcaggaataggaggttttcgcagagcgctggatttgctcagtaaggatggtatcatgaactttaacagcattggcttttctgaaattgatgccaaggcgaaagctacctataagtctaatttcgatgttgaaggtgaagttgacatgggagatattgtggcatatacatccataaagtcgaatatagaggatttgcctgactttaatctgcttacaggaggatttccttgtcagactttcagtgttatgggaagtcaattaggattcggcgaagacagaggtcagatgttctttcgaatcatggatattctatccatcaaacatcctcgatatgctttgcttgaaaatgtgaagaatctttataatcacgattctgggaacacctacaagaggattgaaaaagaactcaggaatgaagggtattatacctatcccgtcttattgaacacctgcgatttctctttgccgcaaaagagaaaccgcatatttatctttgcaaccaaagaagatttaggcagtacattttcttctgaatttacagctcagaacatacaatcttgctttcaagaacacattaagcagtcaagtgttatcatttgtaacagcacactggacttgctgtcaaagcaagtcgataagaaatattacttatctgaaagaatcaaaccgactattttggcagacggttctgcaaattttaaatcgaaatccgatatcaatcagttaattgcaagaacacttacagcttctatgcacaagatgcatagagcctgtcaagataattattttagccaggattttattgactcaaacggagaaatcaatcatgtcttggattacacaaaagaacaattagctactttggatatcagaaagttgactccggaagaagcatttatgcttcaaggctttcctgctgactttgccattagtggaagaaaagctggcgtatctgacggagctctttacaaacaagcaggaaatgcagtcagcgtgaatgtagtttatgcaatactgctttatttaatcaagaatggaataataaaagaatactatgaatgaaataataaaacatatcaatgatacaaatgccagttatcgcgatacctctgctggtgatgcaaagaatacggatctgtttcttgataacgagcactatgccttatttgaaggttgtggggatcaagtaaaagtaagatttgacaaggagaatctttcaaaagctattctctttatcgcttcgattttaccgaggaagtacgataattcttcggtgcataaaaagattcaatattctgctttcttcgttttggaacagttggccattcttgatgctgtgtttacagagaatggattgcctgtacaaaaaaagatacaaacatggaatgctcgtaaagatgtcccacagaagaatggtaagattgatacgcgcttctattttaatgggcttatagaggatataacctacaaattcaatgggtctattgaaaagggtaagtttaccatcagaaactatgttgcaggtggttattctgacttgcatataagcaaaagtgaagatggcttctttgatgttcgagtaacaaatgtgttggagccttacaatgatggaaaggataaggatattaaagaagatattgatagaagttcttctgtaaattctctccagcaaatcttctacggagcgcccggtaccggaaagtcttacaccatcaaccataccacagtgggagaagatgtcattcgtactacgttccatccggatacggattactccactttcgtaggggcctacaagccgaccactattgaagaaacggtgatgacggttatcggtacgaaggcggtaccggtagagaacgcggacggaactccacgcaaggaatcaaagattatctacgagtttgtggcccaagcttttctgcaagcctatgtgaaagcgtggaagaaggttgcagaagccgaaggcgaacccaagaaacaattcctggtcatcgaagaaatcaaccgaggcaactgtgcccaaatcttcggggacttgtttcagttacttgaccgcaatgatagtggattttcagattatcccatccaggcggatgccgatatgaagcgacagctacagaaggcattcagcggtatggaactgacgaacaaggaggcgctgaacggcctgtatgagggtagaaatgtggcggaagaagtgatgaatggagacatcctgctcctgcccaacaatctgtacatttgggctactatgaacacgagcgaccaaagcctattccccatcgacagcgccttcaagcgtcgttgggattggatgtacatgcccatttcgaatgcgaacaaggaatggaccataaaagtaggaaacgacaactacgactggtggagcttcttggaaagagtaaacgataagattggttcgaccactaattctgaggacaaaaagctaggttatttcttctgtaaggcacaaaatgatgtgataccgatcgagaagtttgtaggcaaggtcattttctatttgtggaacgatgtattcaaggactatgagtttggcgatgctatttttaacgatgaggatggcagcaagctgacattcgctaagttctatacagaggaaggaagaaacgcccgaattgtgacagataaagttgccgtattccttaaaaacttgggattggaaccttctttcatagaaccggatgcagaaaccaattctgtgaccaactctgaatctggcagccaaatggattattcaaagtattcgctgaatggagaaggaagctatagtaagggaggtcttgtctatgaagcagtcaagcgttatgctacagctcacgcagaaagcactgctgatgaaatcgtgaatacttggctccgcctaggaatcaatgttccatatcttgtggaaacaactgaagagcacgaacagcgaaaacagcagacttctgacagccgttttgaccaaaaatccaaaatgctggaattgcctaaccacgaggttatttacataagcaaccaattcaatgtacaacgcatagaagacttcattgaaaaagtgaatgcgcagccttggcatctgaccctagctaaaatctaacttcaattccccaaaaaaggcatgagaatattgattgaagaatatccgtatcaggtggccgacgtgaaagacattctccatggcatcgatgctttggagaatgtggaaggccgtgtgtccatccactatgtaggctattattacaatacgctgctgagggattgcgtgttcattctccccaaggtattactaaaaggcaagccaggcgaagaactggctttcggcaaataccgaccggaggacatcgtcaacctggaagcgcagaatccgctgaacagcgaagaacgcaacttcctctacaagtttgccgtatggatttaccgggccatcgtggtgtataagaacgacaaacggaatgataccgacatcgtatatcactcgaagattgcccatgtgggaaacggcaagcgacgattgagtaatacgtatctggatattcttctctccctcattcagttcaaccgcgagaaccagagtttcttcttcttcatcgtcaagaacctgcatagcggcttgaacaagattaactggacgcggactatggctacacaaacggccttgatacagaacggacagcccatttatctgaatccggtcaataaaaaacggcagatcaatttcgatgaagagttgctggtcatcttcttctcaatcttgaactatatgggcgacacctacggctttcccaaagaactttgctgtcagtttcagctgattaccggcaaacggtttgaaacttacttgaacggattcggcaagacccggttgcggcaaatcaagtacaagtacttttccgacaaggccctgcagctatgggacttgtgctacgctttcttcgacgaagcccggcaggtctatatcaataccgaacagcgcgagtatctgctggtaaagagctttcatatcgtgtttgaagccatcatcgacgagctggtgggcgacaacccgctgccggacggcatggaaaagaagcaggaggacggcaagattgtggaccacctgtttacggcgcaaagcctgattgacagcgaagccaaacagacgtactacatcggtgacagcaagtactacaagatggggcacgaactgggttcggaatccatctacaagcaatatacctatgccaggaatgtcatccaatggaacctggatatattcaacaacggaaagaccccgtcctccggcattcagctacgcgacgacgtgacggagggctacaacatcctccccaacttctttgtgtcggccaagatggacgagcagttcgactatggcaacgacggcatcgaaaagaccgaccgaagaaaaaacaagcacaaacaggtgcagtttgccaaccgcttgttcgaccgcgataccctgctgctgttccactacgacgtgaacttcctctttgtgctgtcgctctatgcccgtaacaacagcagtcagaagcaggtatggaaagacaaggtgcgcgacaagttccgtacggaaatacaggagtggctgcaaaaggactatgattttcatgtgatgaaggcacacccggacgtggacggagaagcgtatatcaaacagcatttcaaggaactgcttggcaaggtttatgcgccgtttgccgactccggcatctattcgctggctctggacaatgctccccgatacgaagccgagaaccggcagttactccaggaactgaagaaacacttctatctgacggattgtccgctcggcacacagccggaggatgcactgaaggaggtggtatcgcaaggggtaacgccttcggaagaaggacagaaggacggagtgttgatggtgatgatggagcaatatgccacgaagagtttgaatttccttaaaaatggaaagttagcgattggtatcaaatggaccaaagacagcatggaaattgttcagaatatcaaatctattggctatgttttgtttcaccatagaagcgacaatgaacaatatttattcgcgctaaagaaagaatgtgagataaaacccgtaaaagaattggaagaagagcggtattgtaatataaaaacaaccgaaatgtatttggttgttgatatagattcgtcatccgaattaaatgctagccattttcattctagcaaaaaggcctatacgccaacgaccaggtatgatgctcaatattcgacaataaaggaattggcatatgatgaatagcttcgaaatggatagagattagtttgcaattttgtctttcgataacaaataaagactagtaagtttgaggtacagatagcgactagccgaccgagagtcggacggttggctaataataatataatcaagccaacaatctgttttgaagagaaaatacactatctttgtactagcgaaacagctgtttcggaaatggctatttcggaaattctaataaaagacaaggatatgagattttttgatagaacagaagagatagcctccctgcaagagatacgtaagcaggctcaagagaatgcacagtttacggtagttacaggtcgacgccgcattggaaaaactatgcttgtacggaaagcatacgaagatgaacctctgctgtatttctttgttgcccgaaaagcagaaggggatttgtgtgaggactaccggcttgaaatagagaacaaattaggcattccaatcatgggacggccggaacgttttgccgatgtgttcgaatacctgatgaaactctcggcggtacgtcccattacgctcttcatcgatgagtttcaggaatttttccgtgtgaacaagtcggtgttcagcgatatgcagcgcatctgggacctctacagccaagattcccgcataaatctgattgtctgcggttcaatctattcaatgatgactaagattttcaaagacaagaaagaaccgctgtataatcgtcagtcgcgctttatgaccgtgcggtcatttagaccctccgtcctgaaggaaatcctgacagaatataatccctcctatacatcggaagatctgctggccctgtattcattcacgggtggtgtggctaagtatgtacagctgcttgtggatgccggtgcgatgactaaatctgccatgcttgaccacatcataaaggccgattccatctttctgggagaagggaaggctgtcctcatcgaagagtttggcaaggattacggagtgtatttctccatcctttcagccatagcaagaggaaagacctcccgttcggaaatagagagcgtggttggaagggaaatcggaggatacctgaccaaattggagaacgattatgaggtcattgccaagaaacagccactctttgagaagagttctaccaagaatgtccgttacacgatagaggacaatttcttcaccttctggtttcggttcatttacaagtacagctatatgctggaaatagaaaactacgatagtttgaagacaattatcaatcgggactacgagacgtttagcggtctgatgctcgaacggtatttcagacgtgtgctgattgaacgcaaaacttttacacgcatcggtggatggtgggaccgcaagggagagaatgaaattgatattgtggccgagaatgagctggacaaaaaagccactttttatgaggtaaagcgtaaagtcggaaatatcgacacgaaggtgcttgaacagaaggcaacagcctttctgcgtgcaacgggcgaattcaaggggtatacaatcattaaccaaggtctgtctatggatgatatgtagtgggctggatatagtctgttctataggcattgatatgcttttgtacactgaaggaggtatttcgtacaaggaggtttgttgtgtgagggagtttggaatttttcatggaaatttgtggagtaatgataaaaaaacaaatgctttgaaacgattttattttatttcagtactgattttatttcagattgtttaaaggaaaagcagtcaggagagctttgtgtgaactggggggggggaatttttgtgatagtagaaacgcagactcgagagtcatttcacgatttttcacaggccctggtggatttgggggtatggaatgctatttatttggttggtacttctgaaatttggggtgggtatacagataaaaataacctgcggatattttttactgacgtagaaaatcccgcaggtgagtatatcaattatatcgtatggagacgaaaaaactagtcggctatcattacattgtttacccgtttaaagaaaaagcgatagcggttccagtgaaacgggaagtaagacctgtttttctgtatggtattgtgacgaaagattattgtgtttactgattttccatatacgatgggggcatcaaatgtgttgaaaaggttgttttcaatgataactgtgccatgaaaatagttttgctgagcttgcagatttggaatttccgggtatatggagatgatagcattggtaaactgaaacaggctggtcagtgcattgataaagcggttgtttcggatggtgacgttacggcaggcaccggtttcgtaccaaccattgcagtctccgcatagaagaatggcagtaccggacgtgtggtcgaagagattgttttcaacgaggacgtcttgcggagtgctgaataaggcaccccgtgctcggttgttccggatggtattgccggagaatatgacttgcggagtccatgtcaggttttcaataccgaatcctgttttttcatgaatagtggtgtctatggcatgtgccaaggtgatgatgaatttatgagctccttgtatctcatttttgtcgtatggacggatggaggttattcggttttctttgccgattaaatccattgttgcagaacggacaaactgcacttggtcgccttggcgtccccattcgaatccccatgtctgaggatgcatgtatcgtcctactaaagtggtgtcgttgattcgctttacaattttcaggtaggttccgtgaacattgatggcatcgtccatcataccttcgtaaagtccgttgcaggagatgattttacctttgcaaccggaaaaatgagtggcatcggcctgggtggtgaagtagcgggtatcattttcgccacgcaagcagactgaaaaatggtcgagggtgatattttcacatagttgagccaggagtcccattccttcagcatagtgtatttggatattttccaggcgggtatttacattatgagcgaggaacagtcctggcgccggacgttcgtatgtacgcatggcaaccacagttccgggaatcaagcgggaatctttccaggcgggagcctgtagaataccgggagctttttcttggatgccccgggtggagaaggttaggtcgctcgttctgtaaaccactcttttggtcttttcttcaaatgcaattcccgtagagggacgggttgtccaactgtcaccataggcctcaaattcgtttgtttccgtaatccggtattttacatagtctgctactttaaaaacaacgcctttgtccggggtgttttcaattatctgtacttgtgtgatgtgtggattttcaaagtctatactgaaatttttcagtgtacagttttctgagtgcagaagagagagtggcaacattcgtccgtggaagataaattctgcaccttgaccatcaagagtgaagtgcttcagtttttccagtgtgatccctatttttttagggtttgtctggtcgtgattggaaatataatattcacgttctattgctcctttttcataaaaatggtatcgtcccggctcaaagcgaaggatgatactatctgtggaatggcattgtgtcttgattttgtcaagagccttttggatgacaggtgttgcatttttcttggaatcggcttttagaccgaattttttcatttcataaatacgggtttgtgcatgggtgactgagcatagagctgtcagggcaataatgataaaaacaaaacgataattgtgcatgataaattttgataggtgtttgtgacggcaaaggtaagattatttttcgatttgttttccgtgtttttattgcttatttttgtattttctcaatttttaatgtcatgaatcttaaaatcaaaacattgataagtagtcttttggaatatgaagaataagaacttgtatatttttaattgcgattgtgagatggctattgccaatggaggaaagttttatatgccaccttcaaatgtaaaaaaaatgatgcgggatttggcttatcttccagcttatctgggtgaggatggagattgtgttttggtagaagaaaaattggctgttgaaaataatttacaagtggattgtaaggctattttgcttgatgaactatctggctatcctgaaaaattagtaggagccccctggggaatgagtcctaaaatgtgccattggatgacagaaagatgtttgggagacgagtggcaattggcacaaaaggagtggtatagtagaaggaatacttgcgaagcattattgtttttagtaaaaaataatatagtcgcacgtgatttcaccattccatatatatgtaattccttagaagaagttgttgataaagccagacatggtagttggttagtaaaagctccttggtcatcatccggaaaaggtttgttgcgtttgaaggatggtgtatctgataaagaaggagaatggataaagggtgttttgaaaaaacagggttatgtgatgcttgaatgttttttggacaaagtggaagattttgccatggaatttagagctactgagcaagggataatttttattggatggtcaagttttttgactggagagtatggggaatatcgagataattacgttggtgctcagagtaatattgaaaatcatttggcatctcttttgggggatgatatcttaaagcaattattagtgtatatgcccacggtgttgcagaagatttatcctacatacaggggatatttgggtgtggatatgatggcgtacagagatgaaaaaggagtagtgcgagtgcaaccctgtgtagagattaatttgcggtgtaacatgggtattgtggcattgtatttaagtagtaaatatttggatgtgtgcacaaaaggggagtttaccataacttttcattcaagacaaggagaagcattgaaagagcatcagcgtctatgtcaagagtttcctgccgtatataaaaataaccggataaaatccggttatattgcactgacaccagtcagtgaaaccactcaatttgtggcttcactcaggtgttattgaatttttgtatcttttaaaatcacatcatgtgcaccaccttcaacaatagatgttgatgatactagggtgatttttgctttttcctgcaattgcggaatagtgatagaaccgcaactacacattgttgatttgatcttacctaatgtaagctccagattgtccttcattttaccagcatacggaacataactatcaactccttcttcaaatttaagagctgcttttacgttacctcccatatcgtagcgctgccagttttgagcacggttggaaccttcaccccaatattcttttacataggtgttaccgatagacaactttttgctaggactttcgtcaaaacgtgcaaaataacgtcccatcatcaagaagtcggctcccattgcaagagctaaggtcatgtgatagtcatgtactaaaccaccatccgagcaaatagggatgtaaattccggtctgttcaaagtattcctgacgagcctgacatacttctataagagctgtagcctgtccgcggccgatacctttttgttctcgtgtgatacagatagaaccaccaccaatacctacttttacaaaatcagcaccggcttttaccaagtaaaggaacccttctttatcaactacgttaccaccacctatttttacttcgtcattgtatgtttctttcacccaacgaatggtttcgtattgccattcagaaaatccgtctgatgagtcaactactaatacgtcaacacctgcatcaacaagcgcaggtacgcgttctttgtagtcacggctattgattcctgcaccaacaactaattttttgtggctatctaacaattcataaggattttcctgatgattgtcataatctttgcggaatacaaaatattgaagtttctggtgttcgtcaataatcggaagacaatttaatttgtgttcccagataatgctatttgcttcgcttaaagtaagacctactttaccaacaatcagattttcaaacggagtcatgaattctgataccggcttgcttaatgagtctgtttttagacgataatcacggctggttaccataccaagcaatgtgccgtttgcagttccgtcatcggtaattgcaactgtggtgtgaccggtagctgctgtaaggttaacaacatcctgcagggttgcatccgggcgaagatttgaatcgctcactacaaaacccgctttgaatttttttacgcggcgaaccatttctgcctggctttcgataggttgtgagccgaatataaaagacaatccaccattccgagccaaagctattgcaagaccatcatccgatacagcctgcatgacagcagatacaaatgggatgttcaattggattgccgaggtttctccctggcggaatttaacgataggggttttcagggaaacattgtcgggagtacactctttggtagtgagtgacggaattaacagatattctccaaatgtacgtgatacttctttaatgtaatgagccatattctgtagtatttttaaaaattgagcgaaattactctattttcacaacattgccaagcactgtctgtaaaaaattatattcttattgattatttctgcaatatttgattgtctgcaggtgttaatttttctgtttttagattatatattatagtgttctctatatttgaataattaatgcatgattttaaaaatcaattctctcaacaattctcctgccgatgtattagtattaccgacacctttagatttcatatcgtattcacgtagcagagaaattacagttgcacattttttggcactatatatacgactgccttccgtataatctttcatgaagaacggatgtactcctaatatttttgccatttcctgtatattttgtgtttccctcttttgatagtggtaagtgagaagattcaagaaatagcgaaatagggtggagatggtgagaaccatcggattgtttttgggatttgcttcaaaataattgacaatctgattggcttttagtacatttttatgtatgacggcatttaatagttcaaaactattaaagtctttactgataccagtatgttcttcaaccagtgattctttgatttctcccccaggaggaagcaaaagcgtcaatttatctatttcattggcaattctatttaaatctgcacctaaactttcagacaatataccggcagctttaacagagatgttatatttctgttccttacaatagttgataatccattccggtactttattgtcgtaaagtttggccgattcaaaatagacacaattaggggagtgtgctaatttttgaaaaacacttttacgtttgtccggctttttgtttttgtaagcaaagacaagaatggttgcaggctggatatggtcgatatatggtgtcaacaaatcaaaatcctggatattctgtgcttcccgaatgatgagtacttgtttttctgccatcattggaaaacgtcgtgcagtgtcggtgacagtgcgcatgttgacatcgttaccatacaaaaccatctggtcgaatgccttttgatcttccggcaaaacggtgttttccaacaaggacgttaaacggtcgataaaaaaaggctcttcaccgcaaaagaaatagatgggtttatacttttttgctttaatctcttttctgatttcttcaaatgtcataaccggtttatgttcaggtttgcctaattataggcaaagttagcaaaagtttttacttcccttgcagtattttctggacgattttttcaatttcagcatcttcgccttggggatcatatgcagttttcagattattaccgaatattagggctattgattgccagaaataggcattgacggtaccacgatattcccgaatatgagcaaaggaggtatggtttgtttctcgatagataagacggatgagaatttttccttgtgtgatacttaatttcattaacggagccttgaatgtcttcatcaattgagaatactcctctttgagaatttttcttcgctctgattcttttgttatttgtgaaagacgtcgttcgatttcatttactttattggctgcgatacgagcataaggatatactttacgtacattgtattccaaacggagattgcgtttttctcgccggaaatagcgcgctgcatggcgccctctgccgtagatatttgcagattccaagagcacatgagggatggtgtcaccttggtaaaaaatggtgtcaactagctgcttgctctgtgtaaaaccactgattgcatatagtaataaaagcagtgttatgcagatttttatcatccctaagagattttgtttacgcaaatataatgactagcatttaatttcttgtatttttactttactttccatgaaatctttttatttttgtgcttagaaaaatagacagttaaaagttacaatagcagaccgttctatcgctgttccgtcttggaagagaggaaagtccgggcaacgcagggcatcgtgcttcttaacgggaagatgttcgtgagggcatagtagcgtaacagaaaagaaccgttctatagttgaaaggcttaagaataagggtgaaaaggtgaggtaagagctcaccggtgctgcgggtgatcgcagtagccgtacgtctcacgagttgcaaggccatgtataccggcgcatttggtttgcccgaccaatgccggggggtaggctgctagagctgcagagcaatttgcagagtagataaatgatagaaaccgcaaggtacagaacccggcttacaggtctgctattttttttattaaattatttattatgaaatcaattcgggagatttacaatattggatatggtccttcttccagtcataccatgggtccgagccgggctgcaaaatttttcaatgaaaaacacgaagatgcggataaaatacgagtgacactttatggtagtttggccttaaccgggcgtggtcacggtacagatactgcaatattgaaagttgtgtcacatccggaaaatacagagattatctggcaaccggaaattacattaccaaagcatccgaatgggatgctttttgaggcaattaatggtgataccgttacagatagctggactgtttatagtgtgggaggcggagccttgtgggatgaaataggaaccttcgatggaggcgatgtatatccaaagacaaccatggaggaagtgatgcattggtgtttggatgaaggatgcacgtttgttgattacgtacagaaatacgagggcgaagagatttttgtttatcttgaagaagtttggcagagaatgcaggaatctgtagagagagggttggtaacagaaggagttttgcctggagcattgaaattggcacgaaaagcaagttcatataatattaaagcaatgcagtctgtaggatcttctcgtcctatgggaatgctttttgcggcagctttagctgtatcggaggaaaatgctggtggtggatgtgtcgtaacagctccaacttgtggcgcatctggagtattacctgcattgatgtattttatgaaacatgaccaacatatgcctgactatcgtatcatacgaggattggcgactgcaggtttaattggtaatattgtaaaaagtaatggttctatttctggagcagaagtcggctgccaaggcgagctaggcacagcatgtgcaatggcatctgctgcagcaacacaaatatggggaggaactatacggcaaatagaatatgctgcagagatgggttttgagcataatcttggtttaacgtgcgacccggtattaggatatgtacagattccttgtatcgagcgtaatgcatttgttgctcagaaggctagagaggctgctttgtatgctctttattctgacggacgtcatatggtgacatttgatgaagttgtcaaaacaatggtagaaacaggattggatatgcaggcaaaatatcgagaaaccagtttgggggggcttgcttgtgtatgcatgaaaaaattgaatcaactaaaaaagattgatcactagcatggaagacagagtcaagctaaaaattgtagggttcactaatacgatagcgttattaggaggctttgcattggtgcttgaggatgacgaaatgcatcgtaaaatacctattattataggtatgtcggaagctcaggctatcgctgtaaaattagaaaacgaaacattatgtcgccctttattttatgatgttgcaaaaacgctattagataatttgcaagttgatttaatagaggtgtttgtgacacatgtgaaagataaaatcttttatactgaactattatttcggactaaagatggacgagaaatcaagttggattcccgtatttcggatgctgtcgttttggcattggaatataaatgtcccatatatgcaacacgcgaagtggtagaacagacttgtttaccaagtccgaatcttgatagggatatagttaaaagtaaggtaaaaaatagtattgaccaattgtctgatgctcaattgaaagatatacttgaacaggcaatcaaggaagagcgctatgaagatgctgcagaaataaaaactatacttactaaaagaaaaggaacaacacgctaatatttaaatagagatggaacgtattaaatttgattacagcaaaatttgctcatttgttgacaaagaagattttgcagccttaatgccacaggctcaaaaggcaatgaagggattggtggaaggaacttgtaaaggcaatgattttttagggtggctgaatttgcctgtagatatttctacagaggaaatggcagacattgaaaagacagcagcaaatttgagagcgcgtacacaagttgttgtcgttatcggtatcggaggttcgtatttgggtgcgcgtgctgtcatagaagcgttgtctaatagttttcataattatgaatcagcaagcatgaaagttatttttgctggacataatattagcgaagactattattatgagttgcaaaattatttggaaaacaaagagtttggcatttgtgtgatatctaaatcaggaacaacgacagaaccggcaatcgcttttcgcttattaaaggaattgcttgaaaagaaggtggggcgagaagaagccggaagacgaattgttgcaattacagatgcaaagaaaggagctctgcgcacattggcagatcaagaaggctataagacatttgtgattcctgataatgtaggtggaagattctctgtccttactcctgttggattattacctattgctatcgcaggttttaatatccgtgagttagtgcaaggagctatcgatatgcgaaatgattgtttggctcaagaagtcagtccggctctagaatacgctgttgcccgtatggcattgtatcgtaaaggttatgctgtagagatattggcgaactttcatcctaaattacattatatcacagagtggtggaagcaactttatggtgagagtgaaggaaaagagaatcgaggaattttcccggctggtgcagattttactacagatttgcattctatgggacaatatattcagcaaggcgtacgttttcttatggaaacagtgatttctgttgctaagcccgattataaagtggagattcctgctgatgaagcgaatttggataaattaaattttttggcagggaaacgtgtagatgaagtaaataaaatggcagaactaggtacgcagattgctcatgttgatggaggagttcctaatatgaaagtaattatgccgacattaaacgctttgtatataggccaattattttatttctttgaatttgcttgtggcatttctggcagtatgttgggtgtgaatccatttgatcagccgggagtagaggcatataagaataatatgtttgctctacttgataagccaggatatgaagaagcttctcgtgctataaaagcgaaactttaagttttggtttatttgaaatagaaaacctcaaagcattgctttgaggttttcttatagtacgctcggcatgagtattagctaacgggtgcaagtccccaatgagccctaatagcgggaatcatacagcccaaagcaagggtgtccatcgtgaggtggaatctgaagaaagctggcggcaaacatctggtctgacgaacagaaacttcatataaggcataaaaccgtgggtaaggttgctatacaaaccaaagccccatagctattcggaacggttggtgtaaatgaagcagacataagatggaaagttaatacccttatccgaggaggtctcacggacgcatgagaatagtgaaaaaaaaatcgaaatcagcggagtaaagcttgccgtgagaagtcagcagaagtcatagtagcaaacgaatcgaaaggtttgtgaaggactgaacctaataattaaacgatagtaatagaaacatacctaatgaaagaacgaatgcagaaaacattatccgaaattaatgactgccctcaaagagataggtcggaaaccgaatggtatgagggagtgcagactttcatgtggatgtgtgaagacaacatcgtggaagtaccattcgacaaggaacatcttcttgagcaaatcctgagtcctacgaatcttaatcgagcctataaggcagtgattggaaacaagggtagtggcggtatcgacaagatgtcatgtgaacagttgctcccatggttcaagcctcataaggatttgcttatctgttccttaatggaaggttcttaccgtccgaacccggtcaaaagggtagaaatacccaaggataacggcaagatgcgcctattaggaatccccaccgtggtagaccgtttggtgcaacaagccgttaaccaggttctgagcccaatctatgagaaacaattctccatgagaagttacggtttccgtccgagaagaggctgccatgacgcgataagaggagctcaagagataatcaatacaggctacacatacgtagtagaccttgaccttgaacgcttctttgataccgtaaatcatagcaaactcatagaaatcctcagccgtactatcaaagacggcagagttatcagtctaatacacaaatatctccgaagcggtgtaatgaacaaaggtctgttcgaaacgagcgaggaaggaactccccaaggaggaccactaagtccattgttaagtaatatcatgctcaatgaattggataaggaactcgaacgtagaggtgtaatcggtaattttgtatcgtcaaaaatcggaaaagtaaaatcgacaatagaataaaagaaaatagcattgtaaattagagttgtcaacaactaatcacaatgctatgagtgagacttccaaattacagaagtatctaatgtggtacaaagttaaagaattattttcaaatggcctaaacaagagtcaaataggcatatcattaggtcttcaccgtcaaacggtgtccaagtatctgtctatgacagaagaagagtttaagcagagtcaaagttacgagcgccgatacagccataaacttgatgattatgaagcttatgttatcggagagttacgcaaatggccatttttgtcatctccgcaactccatgaccgtttacgggaacattttacagaccttccccatgtcacagctaaaacggtatccaactttgtcaaccgagtacgtctgaatcataatctgcccaaagaattggaaaagagttaccgtccttatgagaagcaaccggaaacaccttatggtcaatatgcccaatgcgattttggagaacgctggatgaagacttcgcaaggcatacccttgaaagtatatttttttgcaatgagtcttagccgtagccgttataaatttatttatttcagccgtaccccgtttactaccgatcttgcagtttatgcccacgaacttgcctttgaatatttctcgggagtacctcggaaaatagtttatgaccaggacaaggtttttcttgtcaaggagaacctaggagacctgatacttacccacggctttcgagccttggttcgtgaacatgggttcgagccggtgttctgccgtaaatcagatcccgaaagcaaaggaaagatagagaacgtagtgaagtacgtaaagtacaattttctccggggacgtgaatttacctccatagagcaactcaacgaggaggttcaagcatggttgcaacgtactgctaacggtatggagcatcatggcatacgtcgtatcccatcagtggagttcgagatggaaagaccccatctcatgccttatcggggaattccgacaatcccttccccaaagcttttaccccatcatgtcaggaaggataacgtgattacctacaaggggaactattacagtgttcctacaggtacctaccaaggtcaccgaacacaggtatatctggaagaaaaggaagagatgctgtatatttacagccttgaaacagggaaaaatatagcagcacacaaaatctgcaaagataaaggacagttaataagtaatacctcacatcggcgagaccgtgaagctgccttggatgattacgaggctactgtccgtaaaagacttcccggggatacggtcattgatacctatttatctgaactacgcattcataagaatcgtaactatagagacaacctgcagtttatacttctccgatatcccttctatacagaacccacgttgatagaagcctttacaagatgtttggaagtgaaggtctttaatggatgtagcctgatgaaagtagccgaaagtatcagagtccacaaaggagaggcccttgtggaagttcctgtagaaacagagccggtcccatcctccgatacctcttccatggtgcccgataaaacagacatatcaacattcaataccttttttatatgataatgaacgaacagattaaaaatttatgctcgcgtttacgcttgtatgcccttccgaggttattggaatccgaagcccatattgcacgggaacagagcaagacctatgttgaatttttacatgatttgcttgctagagaagttctggaaagggatagcaaagacttacaacggcgactaaaagcagcttctctgccgtcaagacacgacctagaccttttcgaccataattactcacaaggcataaccgcaccaagactgcgtgaattaaggcatctcggatggcttgaacagaattacaatctgatactcatgggaccatccggtaccgggaaaacatttattgcggcaggacttgtctatgaagcggtatcgcaaggttacaaggcatacatggttacgatggaagatgttataaacaccattaaaatgaaaacactgatgccatctgccatgactgcctacaaccgtttgttgaaagctgacctcgtcgccattgatgatataatgctgttccctgtgaaaaaagaagatgcagcgggtttctttaacctaatcaacactctccatgagaaagcgtccttgataatcacaacaaacaaggctccgactgaatgggcaaaaactctggatgatgaagtgcttgcctctgctatacttgatcggcttttgtatcattgtgaagtcattaaactctctggacaaagctacagaatgggaaatagaaaatccatctttgacaatgataaagaataaggataatcccctttaaatagggtttggctatagtatttaattgatattattaacattttgtctcgacttatttgtgtcgattttacttttccgaaaattgtcgatttaaaatttgcttattacaagaggacttccttttgtacgctatgccgatgactcgatgatattctgtaagtccaaaagggcggcaagaagagttaaagagtccataacccgatttatagagagaactttatatcttaaagttaacaaggaaaagactgtagtatcgtatgttcgaggagtgaagtatctcggttactccttctatgtaatgaaaggcaaatgccgcctcacagtacatccgaaatccaaatctaagattaaattaaggcttaaagaactgacgaatcgtagcaacggatgggggtatatgaagaggaaacagaaactgaaagaatacatacgtgggtggactggatactatcaccttgccgatatgaaacgtttccttcttgatattgatgagtggttaagacggagaatacgtatgtgtatatggaaagcttggaagaaacccaagaccaaggaggcaaaccttattaaatgcggtatagaaaaatacaaggcacgggaatggggtaacactcacaaaggttattggcgtatcgctgatagccctatattgaaagtggcgataaataatgatagcctgcgaaaggcagggtatccctccttaatgggttcgtatcttgaatggtacccaaaataggaaccgccgtatgccgaacggcacgtacggtggtgtgagaggtcggtgaacaggaaaataggagataaacacctataactaatgtttacctcctactcgatttaaaatacaggaatattataaactaaaccaatagaaagacgttgaggatttgaaccgataagtcccatttcaagtgctcggtttgtcatatccacctgtttggcatggtatacagcaaagaaacgtaagttttccttcattggaaaatattcaagaccgccttggtagccaaaagaggtacggtattttcctttttccataataccatttttccgtatggaagctgtttcatacataccttttaaaaatagattcaacttttctgctgggcggtagttgatgcggcttacaattgataaatatccacaatctgtcgcacagaaaggagcttcgtcagttgcaatagttgatgataggatacctaatttgtctatatcttcagatgaataggtagcatcaacatacatgttgaaattatcttgcatccatgaagctgctaaagtcatcatgtttacattgcttttatctccttcgtgaaaaatagagtaggagcatcttgttgctaagcgattgtcaaagaataatccgttccaattgaaagtataacccaatggtagctttgctgctttaaaatcctctgggataatagcatatgtatcttccacagaattgtttcttccgtttacaatctgaaagcgcaattcctgtgtaggagtacattgccattggatatgagctcctactagaaaacaggtcatattgtttccaagatctgaaaactcatatatttgtgccgggtctgaatcatattcaaatccgccaaagtctgcgtactgtttaccaacaaaagtactcagagcaggagtgatgttaaatccaattcccaagcaatctatggaagatggcatattatctaagctattagctttattacttctattcaaatgttgcatccatttgtaaaaaatacggtcagtaatgtttcctgtcacttgcagacgcaaataatcaactctaaatgctgctttgtcagcttctgttgcagtcaaatctgtatggaaagccatacgggtgttcacactgacattgagaaaatcatttttcttgatggatttggtaatcgtctcaatgattgttttttctctgttcgtactgtctgttttgtgaaaagcaaatgtttcttttaatcccatgtgtacgaaacatgcggataacatcagtaaatgtaaaagtctcataaaatattttgtggttaattattttcgaccgcaaaaatagtataaaagcgtgaaacgtttactatgttttaagaatatcatgttttatttgtgtgattcgaaaaaaaagtcgaaattcgcaaccataattttttaagggaaaacttgttgaactaaaagcaattaaaaatgaaaacatttggaaaattaaagttattggcaattggagttctactaatggcaggcatgagttcatgcttgaagagttcagatccaggatttggtattgctccttatttagcctatatagaacaagacggacatggaaagtctgctagatttatgccggcaatgcaattgtttggaaaccagcctattgatgtttctctagctagtcctgtatgtaaatttgagaataataattatatgtttcaagctgttgctggaagcaataatactctgcttgagttaacgtcttctatgaatactccggttgataccgtaaaatcttggatatgttcaatcactgcagtgtctaaaacagaagaaccggaacaagcgagcacatcatttagttttagggctaaaaaggctttgggtgaatttgatgttgaaagtttagcatatagtggaactgacagcagagtcaccggagaatggaagaaagtggaaaacgcagaagaatatatattggtctatagagaatcatccaatagaatgtggttacccgctgctgaatttattgttgttgaaaaggatggaaaaattacagcaaatacgacattaagtggagctacaaaaggagcaacaatggatatagctgttgcagcatctaatggaacattttggtctattgatggtaaaaagtctattacagtaggaactgatgcaaaataaaatcaattaagagtaataaaaaaaccagctaaaaagctggtttttttattgcttgtgacttttattatttggataatctcattgtatccattgcgattaccaattcttcgtcagttgtaatgaccattacttttgttttagcatcttctgtactgattacaacatctttgctcttgatagttgcattcaattcattgttaatcttgacgcctaaatagtccatatcggcacaaactgcttcgcgaactggttggtcattttctccaataccaccggtaaagatgattaagtcaacaccattcatggctgcagcataagctccaatgtatttttttacattataaacaaatacatccaatgcaagggctgctctttcattaccagcttccattgctgctgttagttctcggaaatcggaagatacaccggaaataccctgaactcctgattgtttatttacaagagcgttcgcttgctctaaatttaatccttctttttcacagatgtacaataatgcacctagatcgagatctccggcgcgagtacccataacaagtcctgcaacaggagtgaagcccatagaagtatcgatagattttcctccttttactgcagagatagaagctccattacctaagtggcaggtgataatcttcttctcagcaatatcccaacctaacaaacgacatgctttttctgcaacgaatttatgggaagttccgtgaaaaccatatcttctaataccatatttctggtaatattcataaggaattccataaatgaatgcctttttaggcaaagtttggtggaacgatgtatcaaaaacagcaacttgaggtacagatggtaataatttttccattgtttcgatacctttcaaattggccggattatgaagaggtgcaatttcaccaagagctttgattttagctttagcatcttcagttacgcgcacgctttctgaaaaatattcaccaccatgagcaacgcgatgtcctacagcattgatctcgtttaatgatttcaaaacaccatgttgcggatcaaccaatgctttcaggattaaatccatacctacgctatgatctgcgataggttgctcgataactactttttcttttccttccggtttgtaagtaaaactgccacaagtcagaccaattttttctacaataccttttgccaataatacggcatctgcgtccatattcagtaattggtatttgatagatgaactgccgcagtttaatactaaaacattcatgtctctattcttttgtgggggagtccccctgttattatttctttgctgctgcttggtttacagtaattgctaccaaattcacaatatcactaactgaacatcctctagaaaggtcgttaattggagcagccataccctgcaatacaggtcctacagcttcaatacctgcaattctttgtaccaatttgtagctaatgttaccaacttccaaacttgggaaaattaacacgttagctttacctgcaaccggactgcctggagctttgctattgcctactgatggaaccaaagctgcatcagcttgcatttctccatcaatcattacatccggagccatctgtttagctaattctgtagcttttacaactttatcaaccaattcattctttgcagatcccttagtagagaaacttaacattgccacacgcggttcaattttagctattgcacgagcagttcctgctgttgatacagcaatttgagctaattcttctgctgtcggatttggaagaactgcgcagtctgcacacacaattaatccattttctccatactccggcttgttggttaagagtaaaaatgctcctgatacgacagagatacccggcagggtttttacaatctgcagagcaggacgtaatacatctccagttgcattttgtgctcctgcaacttctccatctgcatcaccactcttaatcataagagtagctaaataaagaggatcagtaacaagtttcatcgcttgctctttggtcattcctttgctcttacgcaattcaaccaataagtcagcatactcttcttttttggcatgagactgcggatcgataatcgtagccttgtcaatgtttttcaattggtgtttttctgccaaagctttaatctcggcaggattaccaattaaaataatttgggcaattccttcaccgatgatttgatctgcagcctggagggtacgttcttcagttccttcagggagaacaatcgttttactttgtttctttgcgttttctttgatttgttctaaaagtcccattatatctcaattttaaaagtaggttcgtaagatgttgcaaaaatagaaataaagaaaggaaaactaaaaagtaaatctaattatttacccttctactctaatttaaatctgattcgtaaccggccatctgcgtagtcactgctaataatcttaaatttgccaatttctgatgtattgttaacatgagctccgatacaagcacacgtatcataatccccgatacgtacaatgcgtaatgtttcactggcatcttcaggtagtttacttaaatctacaccttctggtacgttgtcacgagttacaaattctatactgacaggtaaatggcggtcgataatttcattaactctatcttcaatttctgatattttttcaggagatggagcttctttaataaagtagtccgctttactcttttttctctcgatgtgagtattttttgaacgtggacaaccaaacatacgtaccatggtctgatttagcaaatgctcagcagaatgcataggtggatattcttgtttgttgtgttcattaagttgtatttcttgttccataatttcttgattaattatttcaatggtcatttgttactgcaaaagtagtgaaatgctttctaaaaatgtaggaatctcgaaatattatagataactcttagcaaatcattatttttagtatctttgtcctcgtaattcccaaaaggggaatttatataagagaccaagtctaatataaaagaataattatgaaattgttagaaggaaaaaccgcactgattaccggtgcttccagaggcattggtaaagctgtggctctggcatttgcaaatgaaggtgccaatatcgctttcactgatttgagatatgatgaaatagcacaagctactgaaaaagaaattgcagcgtgcggagtaaaagctaaaatgtatgcttctaatgctgctgattttgcacagactgctgctactgtagaggaagtggctaaagattttggaagaatcgatattttggtaaataatgccggtattacgaaagatactttattgatgagaatgagcgaagaacagtgggatgctgttatcaacgtgaatttgaaatctgtatttaattacacaaaagcagtttctgctatcatgttgaaacagaagagcggttctattattagcatgagttctgttgtcggtgttagcggtaatgctggtcaggcaaactattctgcttctaaagctggtattatcggatttactaagagtgttgcaaaagaactcggttctcgtaatatccgtgcaaatgctgttgctcctggctttattattactgacatgacagcacagttaccggaagatgtacgtaaagaatgggctgcaaaaattccattgagaagaggaggtacgcctgaagacatcgcaaaagtatgcttgttcttggcttctgacttatctgcttatgtgacaggtcaagtactgcatgtttgtggtggaatgaatatgtaattttataatcaccgatgtactgatataccaatgtaccaattcaataccaagtatttggtacatcggcacattggtaaattagtacattatggtgtatgaaattataaagaaatctgctgtaatttcatttatagcagctgcgataagtttactaggaatttcttgtactgcttatcggaatttttctatggaagtattggagccttcttctatttctattgatatcaataaaaagttggctctttatgatcgtaatgtccgcaatgcagatagtgatcttagaatagaggaagaagaatctgaatatcacttattgcgagaatttgccaatggtctgaataatcgcatcatagatttaaaaaaagatacaattatatttattaaaaatcagcatcgtacattgctaaaagatggtgaatctccacaatgtttatcttcagatattcaagcttctttgtatcaagaatacaatatagattatctgctttctttggagatgatttcctacaaaatgtggagagaggacgtccattgttattggttattacgtctttatcaacaagggagtgatataccgctagattccgttgttatagataaatcgttgcttgctgatgtggaaatgccggatgccatgtttgatgagctcgcagctacttattgggatggcggttatgcttatgcacatcgaattgttccgacttggattaaaacagaacgacgtatatataaacaaggaagggtatttgctttaggaaatgcatatatggagacagagcaatttgaaaaagccgcagaactatggcgtaaggttgctaaaatgcataatataaaagcaatcaaagctcatctaaatttagcttgtctgtgtgaatatatgggcgattttatgcaagcgcaatattatctgttgcaagctcaaaaattaacacaaacaatcaaagcctgtcatcagttaattgattaccttcaaaaatacatgaaaatactgaatgatcgaatatacaaagaatccattcttgaaaaacaaatcaatataggtagttaaactatgctcagtatatataaagcttctgcaggttccggtaagacatttactttaacactagagtatttcaagattatttttgaaatgccgactgaatatcggaatatattagctgtgacatttaccaataaggcgacagaagaaatgaaatcgcgtatcatcaacgagttgtacaaattggcagatggacaggatacagactatggaaagattttatgtcatgaattaaatatgaatgcgcctgctttgcagaatagggcaaaacttttactttcgcttttattacatgattatggcagattagccgttactacaattgataaattttttcagcgtattataaaatcatttattcatgagttaggcatttttccaggatataatgttgagctggacaatgagtttgtgctattaaaagcagttgataaagtgatggagcaaatcaaagataatgctgatttgcggaattggatttatgaattgctaaatgacagtatagaggaagggaagtcctggagcgtaaaaaataaaattgcagatttaggacaagaactatttcgtgaaaactatatgctgttcaatcagcaggtgttggataaatttagtgataaacattttctaaaagcatatcgaaaatttttagaccttcagattaaatcttttgaagatgagttgcaattaacggctaaacaagctgtagacctcatagatcaaaatggattaaatattgattcattcaaaaaaggcaaatctggttgtgtggggtggttttataagttatctgcaggaaattttgaccagccgacaccgaccactcgtaaaggggcagaatttgaagacacctggattgcacaaaaatctccagacagagccaatatagaaaatattttaccggatttaatgtccttgttacagagggctcttgcttattatgatacacattctcgaaagtatctttccgcaattcagttgataggtaatctttatcaattaggaattttaaatgatctttatcaggaagtacgttcatattgtaatgccaaaggtctcatgttgctgagcgatacaacgcatattctcaataaattgatttctaataatgacacatcatttttatttgaaaaatgtggaaattattacaaacatatcatgattgatgaatttcaagatacgtcagctatgcagtggaaaaactttcgtcctttgattgtcaatagcctatcagagaattgcaaggcaatgattgttggagatgttaaacaaagtatttaccgctggcgtaacggagaatggagtcttttagcgtacgaggttgaacaacaatttaaaaacttaggtatacagaatgtatatttaagtgacaattggagaagtgccaaagaaatagttgaatttaataatgaattttttgaagctgcttcaaacttgcttgcaagaaattatcggcaagaagttggtgaagaagacgaacgggcgctagtaatacaagaagcatataaaagcttaaggcaaactccccggaaacagaagtgtggctatgtagatattttgtacggtccagaaaaaaaagaagaggatagcgaagcaactatcattgctgatgttataaatgttattggcaacatcagagagcgtggtggcagactgaaagatattgtaatattggtacgtaatggcaaggagggagcatcgattgcagaatacctgatggagtataataaaactgcagacactccggtgtcatttatttccaatgattctctgtatgtatggtcatctccttatgtgcaatttattgttgctgttttacgttatatagttgagccatttgatttagtcaataaagcgcaaattatctatttctataaaacttttgtacagcatgattcaaatgtttctttgcatgagattttcaacagctcgtcagaaacggatattttcacctttttggaaacaacatttaatccttctgcagaatctgttatgtcttattctttgttcgaaaccatagaaacaattatagagcattttaatttgcaagacaaagaagaagaaataccatatctgattgctttacaagatattatatatgaatacgaagcaaataactctaatagtatcaccctttttctagaatggtgggaaaaagaacaaggtaaacgcgtactatcaacttcagaggaggtagatgccgtacgtatattgacaattcataaatcaaaggggcttgaatttgagtacgtaattcttccattttgttcctgggaattagatggagttcgtcctatccgaaggatatggtgtaaaaataatgaacaggatttcaatcaattagagtatgcacctttaaactattcctccaagttaatagatactagttatagagaagattatatggacgagcatttaaaggcatatatcgataatctgaatctgctctatgttgctttaactcgtccaaaggttgagttatacattcggccatattcacccaaagtgaataaagatgggagtatatctcttagtgatataggggcattcatgtatttggtattggaagatatgggagttgaaattgctagttgcggtaaatatgtacttggtgaacaaaaaatattaggcaataagtctaatgcagaggagattcgttctttttctcttcaaaaatatccagtatggcaatctgccgatcgaatcaatgtaaaatacctgtatcgtgattacactgcaccggaagaatccggcttgtctgccattaatgaaggaaagctcctgcatgaaatgtttaagacaatttgcaatataactgatgtagaacaagcagttgctcaagcatatctgaatggacttattcgcaatgaagaaaaggatgaatacattacgaagatacaggactatttaaaaatacctcaggcttctgaatggtttcaccctaaaaataaaataatcaatgaacgtgacattctttttcctggtggcaataaagctcgtccagaccgaatagtcgaacgtaacgataaggttattgtcattgattataaatttggacaaagtgaagaaataaaatacatcaaacaagtacgtttttattgtaagacacttcgtgaaatgggatacccgcaagtggaaggctacatatggtacgtaaaattaggtaaaataataaatgtttgatataaaaaaacagtctctattagagactgtttttttatttgatcagactaagattaaatcttagaatttacaatttcaagaatttctgcttccaaagcatttgctttagctacaatttcagcaccttgattgatgatatctgcagcgaaagctttatcttccaatcctgcagcattgatcttcacattcaagaaagctcccataactcctgcacgagcagccaatgcacctacaccggcatctgttacagagttaggattaccgatttcagccattgctttagctacagacatacattcatagcacaaacgcaatgttttaaatggcacttctgtagcatagcgggttgcatcttgtacagcttgttgacgagcagctttttcttcttctgtttttttcggaaggctaaatgcatccatgattttgttaaatgcattcgtatcttcgtcaaccaatttcatcaattcagtctggtatgtttttcctttttctgcccaatcgctaaattcttcccaacgttcatcccaaccacgtttgtgagaagagaggttggcaaccattgtgcctaatgcagaaccgagagcacccatataagctgaaatagaaccaccaccaggagctggagattcagaagctgtttcatctgcaaaatcagtcaaattcatatcgatcagacgttttttgcctttcattgcttcatcttcaaggatatattcaataatctttttatgcggatcgaaaggatatagttcgtctaatcccaatgattttacagcaattttaatcaattctttatctgacacaccagttgaacgttgttgtttacgcaagaaataacgtccggcttccaacatggcatttaaaggaagtacacctaccagttctgatcccgtaacacggattccacgatctgctgctttacgacatacttcatcgaaagcctcatgcatagatgttacagaaatatctgtcaagttcattgaaatttgagcaataccatattcttcaatgaaccaaccgattgcttttacagatttcaatgtaccaggaatcataacgggtttaccattttcatccaatacttttttacctgtgataggatttccttcgcgttttacacgtcctctttcacgaacatcaaaagcaatagagtttgcacgacgtgtagaagttgtattcaaattaacgttatatgccaccaagaaattacgagcaccgacagcagtagcacccgttttggctgtccattcatttaattcgcgaggaccaaaatcaggatgccatttctcgcttgacaaacgttcgcctaaagcttcgtattcgccagcacgacaagttgccaagtttttacgttctggagtaaaggctgcactttcatagcaatataccggaatattcaattcttcacctatacgtttagccaatttgcgtgcatattctacggtttcttccatagtaatgttggatacaggaactaatggacaaacatcggttgcaccaaaacgcgggtgagcacctttgtgctttgtcatatcaatcaattctgcagcttttttcacagcacggaaagcagcttcacagataggttcaggttctcctaccattgttacaacagtacggtttgttgctttacccgggtcaacatcaattacactgataccttcaactgttttcatagcatcagtaatttgattgatgatgtgcatgtcgttaccttcactgaaattaggtacgcattcaattaactttttcatgtttatatcgtttattgtttaaaaatctatgttatacatagtttatctacgtatcaaaattgttctccatttaagaatatcatttccactaaatcagcggtataggcataggggagatattcaatccctgatattggcgttgtaatataaaaattagccaatttgccgatagcgatgctaccaacttcttcctgaactcccattgcataagcagagttgatcgttgtagcattgataacctcctccggtaacattttatagttaatgcatccaagtgacatgacaaatttcatgttgccagaaggagaggagcctggattataatcagaagcaagtgctacaggaagtcctgcctcaatcattttccgcaccggagaatatggcatatttaagaaaaatgccgcacctggtaatactgttggcatcgtttcgctacctaataaacaagcaatttcttcatctccaacatattccaaatggtccactgaaagtgcattgtattttacgccgacctgtataccacctgaatagtcaagttcattagcatgaatctttgcacgcattccatatttcatacctgcattcagcatacgatcggtatcttccaccgtaaaaaatcctttatcgcagaatacatcaatatagtcagccaaatcttccgcagcaaccatcggaatcatttcattaataatcaagtcaacatattctgtttgccgacctctatattcagccggtactgcatgagcaccaagaaatgttgatttgattaatagaggtgtatcttcttttaaacgacgtataacacgcagtattttcaattcactttcagtatccagaccatagccgctttttatttcaacagcaccggtaccgtagccggctatttcctgaatacgttgataagcagcatcataaagttcatcttcactcgctttacgaatacgttcggcagaatttaaaattcctcctccacgtttggctatttcttcataggaaagacctcggattttatcaatatattcaacttcacgacttcctgcgtatactaaatgagtgtgagaatcacaataagaaggcataaccaaacggcctgttgcatcaatttcttttacaacatcaccacctgcatatattttctctgtatccaaatctttcatttcgccaaagtcggcaatcttatcatcttcaaccagtagccaagcatttgatatcgtatccaaatgtgacatatcacttcctgccacccatgtccgcggatttctttccacttgcactaattgtttgatatttattatcaatgttttcatatatcgttcctttatgtagttaaagcgatgcgaatgtaataaaataaaaggacataacctcgttttctgttatatttaaaacgattgagaaaacattgatttatcacccttttagctgaacacctgcaaacgattagcatccaaacgcagaaatataaatatcaaaattgtaaatgcccagagggaagaacctccataactaaaaaagggaagaggtatcccgattaccggagcaacacctatcgtcattccgatattgactgccatatgaaagaaaagaatacttgctaccccatatccataaatacgtgaaaaagcagagcgctgccgttcagctaattgtatgattcttaggataaatgccattagcaaacctatcaccaatgttgagccgacaaatccccattcttcgcctacggtacagaatataaagtctgtatcctgttctggaacgaagttgaattttgtctgtgtgccttccagataacctttgccccaaaaacctccggaaccaatggcaatttcagactgatatacattatatcctgccccttgaaggtcactttcgatacctaataaatcattgatacggttcttttggtgaggctgtaatttttcaaaagcagtatctacccctatactggctgacatacaaagccacgaagccataagtacccataagatgtttttcatccgtcgcttgtatataaaatatataccgactaccgatgccaaagcatatactgccaatagcaaataatgttctgaaatgctcaaatccaacagccacttcaagaaaagcatgaatccaaaacctaatatgataaaaaatagaagtctgtaaaattcatgtttattctgtctataatagagaaatgcaaacaaagaaccaattataatcatactgattatcacaagtggcggatagagtagggtaaatataaaaataacaatgaagataaaataaagcaaaagcaatgacccatgtaaaccttctctatacatcaccaagataaaagagctgtataccaatgcagaacctgtgtcattttgtaagataatcaacccggcgggtaaagccaaaacaaccatgattaacagtaaactgcttaagcgcattattttaaaaccgtgacgattcataatattggcgatggccaaacaggtagcaaatttaccaaattctgccggctgaatgcgaatccctgcaatatcaaaccaggagcgtgctcccttagattctacaccaaatatcagaacagcgatcaaggcactgattactaacgaataaataatcagagaaaatgccgtaaaaaatttactgtcagtgagcataataacaaatgccaatgtaaatgatgctcctatccacattaactgtttgccataacgttgcgttatatcaaatatgttgctatggctttcgtcatatacagcagcataaatatttaaccatcccataaataccaataaggtataaaggaatattgaaagccaatctatattttttaaaagttctgagcgtctattcatgagcctgtattatttattaattgtacctagaaggttggcatcaatcattcgtttttctaaatcttttcttttgggagatacttctccttttaaatacttttccaatatcaaacctgcaatcggaacggcataccttgctccgaaaccaccattttcaatatacacagctattgcaattttaggattgtctttaggagcaaaaagcattacgatagagtggtcatctccatgaggattttgtgctgtacctgttttgccgcatatttctacagaatcaatagccgctccttgggctgttccgatagaagcagccatctgcataccttcaacaacgggagtgaatatagacggatcacatttgacaatgtgcttctcaaccgggttactaccatcaggtaggggacgtacaatatgaggtgtcatataatatcctcgattggcaatgacacaagccatattggcaatttgcagtggagtgagcaaaagttctccctgcccgattgaaagagacataatatagctccatttccaatcttttgttttaaagattcggtcatacattttcaagggtgggacagacccgctacgctcattgctaaaatccggacaaatttcgtgtccgagcccaaaagagcatataaattctctccagtgttcgtatgagtcgcgaacgtctttgtattttctattctcaagtatccttcgccatacattgacataatatggattacaagaatgctgaattgattgtcttagatttaaaggcgatacatgatgatgacatcccattctaatacctccaatctgtgtctttgaaggtccgtaacattcaaagcaggtttctggagttataaccttttctttcaaaccatagagagcctgtagtgtcttgaatgtcgaaccgggaggataggctgcacctacagtacgatcaaagagcggttcatgtggatcttcactcaatttcttataatttttcccacgttctaatccaaccataagctgaggatcatatccggggcttgatactttgagcaatatttctcctgttgcaggttcgatagcaatgataccgcctttcttattttgcatcaatcgataagcatattcttgtaaatcaatgtccagtgttgtcgtcagattttgtccgacaacggcagatttatcgtattccccgttttggtaagatcccatgattctattgtgattatctaccaataaaatacgttctccctttattcctcttaaaattttttcataggttttttctaaaccattaatgcctatatagtcaccaggtgcataattgctgtctcgttcaatttgtgcttgactgacttcaccgatatagccgaatacatcagcagaatgtgccacattgtatttccgtaacgttcgggtttgcatgaaaaatcccggatatttatataatttctcttgtaaaatggcatatttgtctgctgtaatttgcgagacaagtacagaagctttaaaagttgaatatttacgacacttttccagatttttgaccagcatctttttttcgatacccaaaatagaaagcaattcaagagtatcaaaacttttcacctgccgtggaataatcatcaaatcataagccggctgattttcaaccaatagtttattatttctatcaaaaatcaatcctctggcaggatattgagtcacaatgcgctgagaattctgcattgctttaagttcgaatgtatcatccaccacctgcatataaaacaggcggatgatatatataaggcaaacacaaattataatggatgatataaccgttttgcggtatgagtacttattcattttctaaaaatttgaaacaatcctatttccgttagttttgtttcttttttaaagtgataaaataatataacagcatacacagggtagagaccaaggtacttaatacaatgcgtgctaaagtaatccacaggttgttgaaactaaaagcttcgccaaatatcaatacgaaattgaatattgtattattgagcagtatatatttgaaaaaccaattgaattcactgattttctgttttccgtgtatttcatccaactgttcgcgattggatgtaaataaaagaagcctgggacgaatatacgccagcaaagttgttgctgccgtatgaatacccatcgtatgattggctaaatcgacaagaaatcccagcgaaaaaccaaacaataaaatggctgttttctgcacacgatagggtagtatgtaaattgccaatatgtaaatatttatgtatacataagaatgtatttgtatattgtccaaaatcgttaattgaacaaataataaaataagcagatgtataaaatatgtgacattattcatctccgttagcctccaattgttcttgttcttgtttgcgagtatttgctatgatgtagacatcagatatctttttgaaatctgttgcaagttttactttaatagttaaaaagtttgcagtctctttattcacagattcaataaaaccaataatttccccttccgggaaaatgggagacaggccggacgttacaattgtatccccgacttcggcatccacgtgaaaagggatatcgttcaagtatgtataacgataatcgtcgccgtcccactgaagcgaaccatagtatccatttttctttatttttgcagatacacgcaaattaacattgattagggggagtattttagaaaaatgtttgctggttttttctacaaccccgaccacaccttcactggaacatacagccatttcacttgcaattccatgcaggctacctttgtttatcgtgatatagttttttgttttattaaatccggcattcaacatttctgccgtaatatatacatatttacagtcaacagaatcaacaggatgccacagcgaatcagacgttgactccatttgcaataccctggctttttcaattatatttcggagttcaacattctcagcaaccaacttttcatttgtttctttaagatagaagtaatctctaatttcagttacagttgaagaaatagatccgaaaaaagaataagtataaccggaaaatatagttctctgatagttattatgcataaccatcagagaaaaagctacgatttccaataacacaaaaattatagtgaaatgatattttactatcagctttataatttctttcacaatccaagatattttatctaatcaggaatgagaatttatctacatttttcaacgcaattcctgtaccacgggctactgcacgtaaaggatcttctgcgatatggaacggaatattcatcttgtcagacaaacgcttatccaagccacgaagtagagcaccaccaccggcaagataaattcctttatttacaatatcagcatacagttccggaggagtctgctccaatgctcctaaaacagctatttctattttcgaaatggatttctccaagcagtgggctatttcctgataagacaccggaacttcaaccggtaaagaagtcaaataattaggaccttgcacgataaaatctgcaggtggctcctccaattcagaaagggcagaacctacattgattttaatttgttccgccgtacgttctccgatgcggatattatgctggcgacgcatatactctaaaatatcatccgtcaaatcatctcctgcaatacggattgacttattgctgacaatacctcctaaagagataactgcaatttcagttgttccaccacctatatccacaatcatgttgccttccggagcttcaacatccaatccgatacccaaagctgcagccataggttcgtaaatcatgtatacgtcacgtcctccggcatgttcagaagagtcgcgtacagcacgaatttccacttctgtactgcccgatggtatacagacaacgatacgtagggaaggagagaagaatttgttattcacgctggccatcttgatcatgccgcgcaacatttgttctgcagcattaaagtcggcaattacaccatcacgcaacgggcggatggtctttatattgtcgtgagtctttccttgcatctgtcttgctctctcaccgatagcaattaccttctccgttttgcgatctatggcaacaatggacggttcgttgaccaccatcttgtcattgcagatgataattgtatttgctgtccctaagtcaacagcaatgtcttgtgtcaagaatgaaaataatcccatttgttattattgttagggggttaatgtttaaaatgacgcataccggtaaataacatggcaatgccatatttatcagcagcatcaatagactcttgatccttaacagatcctcccggctgaataatagcagtgatacctgctttatgagcagcctctacgcagtcagggaatgggaaaaaggcatcggatgccattacacttcctgcgattctgtctccaccttgccgaatcgcgttttccaaagcccagatgcgacttacttgtccgggaccgactcctgttgtacagagatctttggcaatagcaataccattggatttggtatgctttacaattttccaggcaaacatcaaatcgcgtaattccttttctgtcggctgacgtttggtcacaaccttcagatcagagtcattcagcagctggacgtctaaatcctgtattaataaacctcccaatactgttttcgctttggtagcttttgtattcttgtgcccgatgctttccaattggagcagtcggatatttttcttctttgaaagtatttccaacgcttcttttgagaaggacggagcaacaatgacttccaggaaaattttggacatttctgttgcagtctctgcatctatttcgcgattggccgcgacgattcccccaaagatagatacagggtccgcttcgtaagcctttttatatgcctcaactaatgacgatgcacttcccacaccacacggattagcgtgcttagcagcaacaatagtcggctcatcaaactccttcaaagtttccaatgctccgtctgtatcgccaatgttgttgtatgataattctttaccatgtaattgaacggcgctaggcaatgagccttccgtatccttgactgacgcataaaaagctgcactttggtgaggattttcaccataacgcaaatcttgtttcttttcataggtcaaagtaatcgtcttaggatactttatttttaatttttctgagaaatatccggcaattaaagcgtcataatgagaagtatggataaacaccttggctgccaacatctctttagtctctgcagacgtatctccattcgctttcaattcgctgatgaccaaatcataatcttcaggatcggtcagcaccgtcacgaacttataatttttagcagcagcccgtatcattgtcggaccaccgatgtcaatgttttctatgatctcttcgtgagaaactcccggttttaaaatagtctgtttaaaagggtagaggttacaaactactatgtcaataggctcgatacttaaatcagccatctgttgtttatgattctcattgtcacgaattgccagaataccaccttcaacatttggatgcaaggttttaacacgaccgtcaaaacactccgggaagtgggtcaaatctgaaatatccataactttgatgccttcttcttttaattttttagaagtgccaccagtagaaatgatttcccatcccatcgaatctaatgactttgcaaactctacaattcccgttttgtcaaaaacactgattaatgctcgtttcattaggactatatttttaattatcgcttgataaaatgctgttgtcaagcgtgttcgtttatactatatactatttcgttgcaaaggtataaaaaaacgatataatttagatataaaattatgtatatacgatgtttttttttatcagaaaaatttctatctttgattgttataatttgtcctatgtaataaattaaaacgacatgaatattattactgctgattttaattggttttcttttctaattgtgattattggcgcagttatcggtattattaagtccagtaagaagcgggtagggcaagaaatgtcagaaccactagaatccatattcacatttgaagaagatgaaagcgatgacagcacagagatacgtgaggaaatcaaagaagaagataaaaaagtagcgaagattttggaagttcccaatattgcagatacaaccgagaaccaggaagaggaacaaaatgtggaagccaaacgacagtttgatattcgccaagcaattatcagcagcgaaattttaaaccgtccacatttttgattcctttattttcaaggttatcagaattcaattcctattccggtagacaatgtaaaagtataaggtttgaaatcaatcaaatcatttttactaagtgattgcaggaaatatctaaatcccggctctaccatcagtttcactttacggcccaaaggatattcaacccccaagcccaaatcagttgaaaggttgaattttctaatattttcagtacttcccaacaattccttatctccggaagccttcataaagactttgttatttacaagtatacctccgctcaatcctccggacaatgagaactgcactttattatcatttaattgatagcgaacatgcaaaggtatttcaattgaaccaaacacttgctctaacgtttcattattgtcagatatactgcttaatacaatagctttggctgttctatacgaaacagcttttctgtcggtatggatattaccgagaggagtattgacacgaggtgctgcattatccgttgaaaaagctgctatacgaggtgcatttttatcttccgtactgcgttgtcccattctggaataaaaaattcctgtctggaatgaaagacgcttgcgtggagtgattgatatcttcattccgccaccgacattcatcataccattcaaatcactgttagaataattaaatccacgtgtatttttgaccgacgatgaataattgccggcagaataagtcggagtaaaatgaccgctgagagtcaccttggcatgctctttctcttttttgatatcttttttcccttcaatcaacagcctgtattcctgttggtttttaatggcatccccacttgtcaaggggataaaatcccgagtcagattctttaattcaaaatttgaattctctgcaatcaaagcattggtgtaggatgtttgccggctaacgggagctattcgttttaatgcaggagtgggagcaacgacatctgtggcagaagttattgtcggtcggacatttgattcttcggcataagcgacttctttttcagctacgctcactttcggtcgggtatcaggaacagcgacttccggctgtaatgtcagaatcgaattgtcagccacttgcatttgctcctctgtatataataattgccacaatccgatacagataacaataactgctgcagctatacctcgcaaccaccatttcccaatcattctcgggcgcttgtttaattgctgttgaataccttcccacacgtatgccggcggattgcactcttgctcttgcagcgcttttttgaatagtttatctatattttcactcattgtccagatactcttttactttcttttttaaaatatctctagctctcgctaaatttgacttggaggtaccttcagtgatgcccaaagctacggcaatatctttatgttgcatctcttcaactacatataagttaaagaccaaacgatatctctccggcagctcctcaataaaccgctgcaatacatctgctggaatacagacatttgcgtcaatgtcagcatcttcaaattccggcaactcttcaactaattgaacaggctgctctttgcggtatttttccagacaaatattgataaatattcgcttcatccatccttcaaaagagcctttgcctgcaaattgtcctatagaatcaaatattttgataaagccgtcttgcaaagagtcttctgcctcagcgcgatctttggaaaaacggatgcaaatggcaaacatttttgcagcatataatttatatagtgcttcagctgcctttctatcgccctgcctgcatttatctattatttgttctatagtgtacattacattctataaaagagatgcaaaattttatcaatggttgcgtatcggtgctgttttttttgctaaccatgtagcttcttcgcctgtcaagaatggagcggtcttttcatacaccgtttgatgatactcattcagccagtcaatttcatcttgattcagcaattcaagtaataaagctttagtatcaaaatagcagagtgttaatgtttcaaaaccataccaatttccaaactcattagccccgacaggaacacacaatatcatattttcgtgacggattccatgacttccttcccgatacaaaccaggttcattcgatgtgaccattccagcaacaatagcctgatctttcaggtcttggcgaatggattgcggcccttcatgaacattcaggaaaaatcctatgccatgtccggtgccgtgcccgaagtttctaagagtctgccacagaggctgacgtgctatggcatcaagattgcatccgcgagttccctctggaaaaacagcacggctgagtgcaatcattccttttaatacaatcgtataatcttccttttcctggcgtgtcaattcacccaacgctattgtgcgggtaatatcagttgtcccatgcgtatattgagctccggaatcgaccaaataaagtcctttgcgttgcaatactgcatcattcccgggaattgcagaatagtggggcaatgccgcattgggtccataggcagatatattttcaaaactgttggacacatagccttcattcatagccctcaattgtgtaaggtgttcagaaacggatgtttcagtcaggtgcttgtctatattttgctccacccagtaaaagaatttagtcatagccacactgtctttaatacatgcctgtctaaatccttcaatttcagtttcattctttatggattttgccaaaacaatcggagaggccacttcttttatttggcaatgtgaactgattctattataaatggcataatttaaagtgctggtatctacacaacaacatttgtcttttgcgagttcgtcaatgaaaagcaacacttggtgataatctctcacttcaataccttcgtcattaagcgctttcaaacaatccgccgtcaccttaggacgccgaataaaaagaaaagcctcctcttgtccgacaatagcataactgatagccacaggattgtacgcaacgtcattacatctgatattaaataaccaggctatttcgtccaaagtgctaaatacaaaataatcagcatggttattcttcaaaaatttgcggaccatttcaattttttcgcttgatgaacagccggttgtttctgcaggaaccataaaaatcggcgtatcaggaagagccggacgctccaaccatacatcaccgatcaggtcggcgttttcaatcattttacatccacttgcttcgagttgcgactttaggcgtttggcgtcactgaccgaaatacaaaaactatccataccgacacggcttccggagggcaaatttgcagcaagccattccggatagtccacagctccggggattcgtaatttatgaagctctataccggaacccttgagttgttgttcagcttggataaaataacgagtatctgtccacaagccggcagattctttcaaaacaacgacagttccaaatgatccggtaaaaccggaaatccactccctttgcttccatacagcaggaagatattcgctattatgagggtctgttcctgatacaatataagcatccagactttctctttccattatttcccttaaggcagacagtttattttcagtagtcataatcgttaatttaaaatttcatcaaatatagtgaaaggtggacataaaaccatatccaacaatatgcaaatatagcaagaattcttggaatcataagccctcatataattacaaatgtaaacaacccaaaggattgcaattgtaaacaaaaacacattacatgtgtaatatcaggctttcgtttatgcgatgttgctacacacgtacgatacatatgttgcagttattaacatttgttttgtttttagatgtaaaataaatccagccagttaattagtattgttttagagaatcttttatttaagtatattccttgatgtgaggcacatggcacatatttaaatgctattatttcataaattaatttataaaatatcttatatccaaatatataaatgagcttattgatacaaataattcaagcatgacatactgcctctaaccgttagtgatttttatgtaaacactgataatcaagcatatataaaacacatcccattttaatggcatatcctttatttcagatgcatatttgcagtacattataggtgtaataattacaattgtaatgcccaatttattacaattgtaattttgttgttcttgtaaatttgattacatttgtaacattaatcattacaaaatgcaagatagatttaaacggttattgagtgaaaagaatctgacagcaacccattttgctgccttgattaaggtcaatgcttctgccatttcgcacattttaaatggacgcagcaaacccggatttgatttattagacaaaatagcccaagcgttgccggatgtaaatatgaattggttgattaccggtaaaggctctccttatatcaacaaacaaacgaacgtctcgccctccataccgtcactgtctattgattcaaatgaaccagtagatgaagaggtggtttctacaagtgttccacacaaaccggctgcaaccgctatcctctcctctgatgtcgtatcagacaaattgcccaaacatacagataaaaaaatcaaacgtgttattatcttttatgaagatggcacgttcgatagttatgaataatacctcccacatacctatatcacaaattgatgtcaaatataagacaactatatctcaaatatatgacaaagatatcagtttgttatctttgatatatagttgtcttatatttaagatgtatttaagtgggagaaaagcataataaaaatgacttcaaatcaagttgatttattcgtttttatatgattttgcaagcgacaatacacttcaaaaagaaaagacagatattttcatatgtattccatatattctcactaaatttgtaccaaacgcaataaatcaagaaattaaaataattgtatacaagaacaatttagagtaagaaaaaatggagcaactggcagcccttatatggaatatagcagacgatgtgctgcgtgatgtgtttcttcgcggtcaataccgtgatgtgattcttcctatggttgtactgcgacgtctcgatgcgttgttggaacctaccaaggaagcagtagagcaagaatacaaaagccagattgaggctggacttgcagataatttggatgaggaagctcttaaagatgagtcggaacaaacttattacaacctatcaaagtggacactcaatcgtctgaaaaatcaatcctcagataataatgacataaactatgcaaatttcattgaatacctaaatggctatagtgagaatgtcaaggatgtgttgaagaactttgagttctatgcgaaggtaaagaaattggccgataatgaccgattgatttcaatcatagaacgaattaccgaccctcgcttgaatcttaccgaccgtccagcaaccgaccccgacggcttaccgcttccggctgtatccaatcttcaaatgggtacattgtttgaagaactgctccgtcgattcaatgaagagaacaatgaggaagccggtgaacacttcacaccccgtgatgtgattgaactgttggcaaagatggtatttgaacccgtaaaagataatctccctaaaattatttcactctatgatcctgcttgtggttcgggcggtatgcttacagaaggccgtgactacttgcttaacatgggcgtaataccaaatgccattcagatgtatggcacagaagtcaaccctgaaacttatgctatttgtaagagtgactttatcattaaaggagtggatcctgaaggtatgcaccgtggtaacacaatcactgagaatcatttccataataagcaatttggttatatgctcaccaatccgccttatggcaaatcatggaaagaggacaagaaaaaaatttatcatgataaggatctgcttgatgcacgcttcaacttgaaattgactaatttcatcggagatgaagaaatcgtggattctacgcctcgcacaagtgatggacaacttctctttattctcgaagaagtggacaagatgaagtcactggaagcgcaaccacaaggttcaagagtggcttccattcataatggctcatctctgtttacaggcgatgcaggctctggtgaatccaatatccgtcgctatcttattgagaacaatttggtggatgcaattgtacaattgcctaataatattttctacaataccggtatcagtacctatgtatggttgctgagcaatcataaacaagaccgtaaggtgcaacttattgatgcttccaaagcttttgacaagttgcgcaagaatctgggtagccgtaactgcgaggtaacgcctaaggatgcaaacgatattttacgtatttacatgaatcgcaccgaatgtgaggcaaatgatgatgtacgcatttcgagcaagatttttgatagtgacgacttccgctattacagcgtacaaatcgaacgcccattgcgcttgcgctgccgtttttctgccgtgaagtgcgatgaacttctttttgattcttccatgatggaactatcaaagtggctttaccaaacgtatggggacaaggtgtttagcggtctcgaagcagaggtgactgatattaaagaataccttaatgagaacgagctaaagctaacggacaagaagtttgctaccttggtgagtgccaagaagtggcaagagcgtcgtgccctacagcaggctgcaatgaaactcatgcacaaagtaggcacggcagaatacaatgattacaacatttttctttcgctgaaccaaaaggcgagcaaggatcttggattaaaactgactgctgcccagttgaaaaacatcttgcgcaccaacgcagtacaagatccaactgcaaaacctgccattgccaaagtgctcaagtcaaagaataaggacattcctgcttttttggctacttacggcatagatgaaagtcttttgcccgattatggctattatccacaaacggatggtacttatgtgacctacgaagccgacagtgatctgcgtgacactgaaaaaattcctgttaaggaggatatttgggagtatgtacaacgtgaggtaaagccttatgtggcagaagcgtggattaaccttccggtcaccaagattggatgcgagatttcattcaacaagtatttctataagcctgctcaacttcgctctttggaagagaatgaacatgatattctggagttagatcgccagagtcaagggtttatcgaagcattgcttaaattgatgtaggcttatggagaaatatcttagctataaagatagtggtgtacagtggcttggtgaaattccgagtcattggaaagtcaaaaaaataaggcatatattgtcactagccaatgaaaagacaaaagaatctggtggtgaattattaagcctttctcaatatgcaggtgtaaccccaaaaacggattctaatgtaggtattagagcagctgaagatacaactggctataacattgtgcacaaaggccaatttgtcatgaatattatgttggcatggaatggaagttatgctgtttctgaatatgatggaattattagtcctgcatactgtgtctttgattttacacgagaatgcgacagacggtattataactaccttctcagaatgaaagtgtattctggagcctttaagactgaatcaaaaggtattatagacagtcggttaagactatatccgcagtattttaagaattttcctttaatagtccctccgatcgaagaacaacgatcaatagctacttatcttgacaaagcaacagctgaaatagatagagccattgcccaacagcagcgtatgattgatttgctcaacgaaagaaagcaaatcatcattcagcgtgcagttacgaaagggctggacgagaatgtggaaatgaagaattcaggattgaattggctgggacagataccatcacattgggaacttgtaagattaggctattcttcctggattagagcaagacttggatggcgaggccttaaagcaaatgaatatgttgatagtggttacgtatttctttctgcattcaacattgtaaataataagatgcaatgggataatgtaaatttcatcaataagttccgctatgatgaatcacctgaaataaagcttaaaattggagatattttattagtaaaagatggtgccggtattggtaaatgtgctagagttgatgaacttcccttaggggaagcaactgcaaatggttcactagcatttataacgccaaaaccagatttagactatagatatttgcactattttttaatatgtgacagttttaaaaaatacacagaattgttactaacaggaatgggagtacctcattttacgcaaggtgcaatgaaaaaagtaaaaattccaattcccccaatcaacgagcaaaaaagaattgtttttcatttggataaagaagtcggtgagtttgatttagccataggaagattagaaaaacaaatatcattccttcaagaacgcaagcaaatcatcatcagtgaagtagtaacaggcaaaataaaagtatcataacatggcaacaaaaaatatagaaccgaatttacggcttatcagtgaatataccaagttaggaaaagatgacagattccgtatcccggaataccaaagaggctattcatggacaactatgcactgcgacaagttgtggcaagacattgaggcatttatcgactcgggagcagacgacccttatttttttggaacaatcattattgattgctccacggataactgtctgaacttgattgatggtcagcaacgcacaacaacgtttcttcttttattgaaagcactacagctccgtttaaaggaagtactggatgatttccaaatgagcccagatacaaaagctctatacaagggccttagtaatagctatgacggtatctttgaaattctattcaaagcagacgatgataaacaagtagccattcaagaagattggaataaagccaagggtattaccatattggaaaacaagagtatcaacgaactctacaaagatgacttccaaaacatcatagaggcagagacctacattgaagccgagaaagcagttcataaaatacctcgcaagcaaaaagacaacaaatacaccaacttcttccgaaatttcaagtatttctacgagaagttgcttttgtactcagagtcaaatttgaataactttgccaagatattcctaggtaagtgccaaattattgagattaagagttggcagatagaacaggccattaccatgtttaattcactcaactccaccggtatgccgctatcggatgccgacatcatttctgcacaattattttcgaaagaggacgataaagatacattcatcgacaaatggcaaggaatcacgctgttggccaaccaacttagccaaagaaaggtgatgaatatagatgccgtattgcaacagtttatgtacatcaaccgtgctaagaacaatcactacggactaaaccaggtcaccactcccggtattcgtaagtactataccatcgaacattcagaacttctgaatgagccgatggcactttgcgattccttcgagaaaatactccagacttggaacaagataaaggactaccccattattaaactcctgcttaagtttaatgaaaacttcaagatgtttttgatggcctatctctaccgattcgatgtaaatgatctttgccctgaagacgtacaaccaatagcagaatgcttgctccgcttgtttgccattatcgaagtgggtgatgtaggtttctcttcctccaatttcaagaccttccttttcaacgagaatttccgtctggtagacgaaaactacgatatctatcagattgaggctgatttcagcaaacatattgaagttacttggaagaagaaagatgtgctcgattatctcaaggaatacgacaagaacattcttgtcttcctaaatgagtatctttacgctaaggagcaaaatcgcaacttcgactttgacgaccgtgtgaatgtagaacatgtcatgccggcaagtggtcacaacattgaagccattcgcatggatgcgcatatcaaaacgaaggaagagtttgacgcactggccaacttactgggaaataaaatactgcttgaagaagacatcaacaaatcaatcagcaatgactggtttaagaccaaaaaaggcagtaccattcagagtaaacgcgggtataagggcagtcgttacggcatggccttggacctttcaaaataccctaaagataaatggggaaagaaagatattgaagacgcaacagctatcgttgccgaacgtatcgctaaattcatcttcaaaaagtaaaaacttatggtaacacctgcaaagagcaacgaacaagcctttgagtggctgatagaacaagcactcgtaggaaatactaaagaagagcgagaacataataaagaaatagctgactttgacacgcagaatccaggtaacgaaaagttttactggggccgtcctgctgacctaaataaagagttggccattgatactgtgcgcctatggtcatttttgaatgctacgcagagcgaaaagctcaaagagcacaagggtaaagatttggaaaagtctttaccaagacaaatatccaaaatcatctccaccaagggcattctggaagtgttaagaaaaggtgtggatttggataatcttgaagatataaaactgttctatcccaaaccttccgaggctgacagtgaggagagcaaacgactttacgcacaaaaccaattctgcgtaacgcgccagcaaacattctcagcaaccaataaaggactggagatagacatggtgatcagtgtgaacggattgcctttatttactatggaactgaaaaatccatggactggacagaccgctcgctataatggcatcaagcaatacaaagaagaacgcaaccccaaagaacctttgctgaactacggacgatgtttggcgcactttaccatggacaaagatgaagtgtattttaccacacagctcaatgaaggaaagactttttttatgcccttcaatcaaggtctgcctgacggccttggtgcaggaaatcctgtaaacgaaaatggctacaagacttcctatatgtgggagcgtattctgaccaaggatacgttgtctgacatcattatgaattatgctctctttgattatggtgaagcgaaaacaaagaaaaaagttcctcatatccttagaaatgccaagaaactaatctttccacgtttccatcaattggatgtggtagataaactgattgcagatgtagaagaaaagggtgtaggaaagcgctatctgattgaacattcagcaggctctggaaaatcaaactcattgacgtggctggcttttaagttgattaaggcttgtgctttatccgaaagcactgtgcgttctcgtggattgggacagcagctatttaacactgtgattgttgtaacagaccgtcgtatccttgataaacaaatcactgataacattaaggcattcggtcaaagtgagaaaacgatagctcatgcagatagttcaaacgaactgaaaacagctatagaaggtggcaagagaattgtgataacaacaatacagaaatttccctttatctgtgggactattgctgacgttagtgaccataatttcgccatcatcattgacgaagcccactcttcacaaagtgggatttccgcagacaaaatgaatgctacagtacaacgtgatccagaccaagaaggatctgatacagacgagttgatagccaaactcattcgtgaccgtaagatgtcgagcaactgctcatactttgcctttacagctacaccgaagcgtgaaacattagagcgcttgggttggcaagatcaagaaggaaaattccatcctttccacctatacagtatgaagcaggccattgaagaaggctttattttggatgtgctagtgaactataccacctataagagttactatgagcttatcaagtcgatcgaggagaacccacaatatgacgaaaagaaagctcaaaagttactgcgtcgtacagtggagcgccatcctgacaccatcgcagtgaaggcagatactatgctccagcacttcgatagtaaagtattccgccagcgaaagctaaagggcaaagccaaagcaatggttgtaacaaaggacatagaatgcgccatccactactataaagcattaaccgacctcgtagtcaaactaaagttgccttacaaggttctcatcgccttctctggtgaaaaagaggtgaatggcgttacctacaccgaagccggactgaatggctttgcagaaacagaaacagcagaaaagtttgaagcagacgaaaatcgaattctagtggtggccaacaagtaccttacaggttttgatcaacctaaactatgcgccatgtacattgataagcctttggcaggtgtgttggcagtacaggcgttgtcacgcttaaatcgtgcagccccagatttgtctaagcgtagtgaggacctctttattttggacttctacaataagaaggatgatatggaagagagtttcagtcccttttacacttctacaactttgtctgaacctaccgacgttaatattctacatgagttgcgtagtactttgttatctatcggggtctttgataaagaagatgtcaaccgattcatggaaatctatatgagtggtgcagaacctgataaatgggttcccattacagatgctgcagctcatcgattcaaccacgagattgagtttgatgagaatggtaaagcagacttcaaaatcaaatgcaagcagtttgtaaaagtctattctcgtgtagctgccatcatggattatgaggtgctcaactgggaaaagatgttctggttccttcgtttcttaattcccaatttgcatgtagatgtgcctggccgtgacgacctcaaagacctattggattcagtagacttgaatacttatggtttgcgccgtacaggattgaatgaaaagatagaattagatactccaccatataatgaactttaagatatttttttaccatgctcaaacttcgctgcgcagtagaacgaatcacataccaaaatccgagaagataagaatcttataaaaactaagagatgtctcgtaaaaatagggatttttcagagaaaagtcggattttttacgaggcatctctttatgtttataggaaggtgtgtcgtaatgcacgatgcaccttcttttttgttcatcactatacaaatcggttcattttctttatgctgcgataattcgaggatttctttgatttatgtgttcccagcatctaaaaacagcagttataagcttataaaaccatccaatcagccagctcatgccttcttttgtcagttttgcacacatttttttatattgaaggcaatggcaaagaaggcaaagtccatgaagaccttgtcctttccaaaatgtcggaagcgtttgtagttcatgttgtttttaatttgtccgaacacggcttccggttctatgcatctctgccctctgtgtttcagcccttcctcggagcagagcaactctttagctttccgtttgtatttcctaagtctgtgattcagttctatcgtcctgtttcctttggctttaaaacaacggcacctcagggggcagccttcacacctgatagctctgtaccgggcattttcgctgacatatccggatgcggttttcacatacctggtgcctatcctctgcatcctttgccccataggacagatgcagaagtcatattcctcattgtagtggaagttttcggacttgaacgagtccggtttgaatctcggccgctgctccatgtggaaatagttgtactttacataggcttccatgccgttttctgacatgaagcgatagttctcttcggaaccataaccggaatcggcaactaccgtatgagtcagcctgccatacctgcttgagaaggattgcaggaaaggtatcagggtcagtgtatccgtagggttcgggaagagggcaaaatcggtgatgaactggttctcggtgccgatctgaagattgtaaccgggcttcgtctgcccgttacgcatggcatcctccttcattctcataaaagtgccgtccttgtccgtcttggaataggaattcctctcttgcagcgtgtccagatgattgtcgtattcctgcagtttgtccctgtgttcttccagttcctttagctgtttgcgtttctttttcagtgcagtcttttcctcttttgtggaaggctcgggtacttgttccagtgcatggcgcaattctcctgccatttcagtcaacatggccggagtgaactcaacttcctcattgttttccgatgacttttcctgggcaatgacatcgtctatctgccctaataggacatgtatcttcttcatcaggcgttcacggttatgctcaaccgtttttcgccagacgaaagtatatctgttggctttggattcaatctttgtcccgtcaatgtattccacattcaggctgatgaaacctttggaagagagaaggagtacggtttgggtaaacacctcattgatttccttcttcacccggttacggaaacggttgatggtaatgaaatcaggtttctcatagccggcaagccagatataatggatgtcacggtgaaggagtttttctattttccggcaggagtagatgttgttcatataggcatatagaatgaccttgagcatcatcttgggatggtaagggctgcggccgcatttcttatacaactttctgaaactttcaagattcagactctcaaccagggcgtcaaccatgcgcaccggatcgttttctgcaatatcctcatcaattctttgaggaaaaagcactgtttgcttgggattgtaaggacgataatgtatctttgtcatagtagaaaatcttatgcctaaagatactgaatctttaggtaataacaaagcccctgcttgtgaaagtcggggctttgtgcgtaaaaaaaggaggtgcgcattttgacacacctccttactaattgcttacattatatcagacctataatatctttgactgatgaaaaatgattttcatccaaatattcattgatgccgtcaacaattttaacagtaattgccggatcgataaaattggctgtccctatctgaacggctgatgctcctgccagcaaaaactcaatggcatccgttgcagacataataccacctaaaccaacaactggcaccttgacagctttagcaacttgccataccatacgtaaggctattggctttacgcatgcgccacttaatcctccggttatcgtgcttaatatcggtttgcgccttttggcatcaatggccatacctaataaggtgtttattaatgatattgagtctgcaccttcagcttcgacagctaacgctatatcctggatactggtaacattaggtgataattttaccatcaaatgtttgctatatacttgacgaacagcttttacaacttcggctgcagatgaacaattggtgccaaatgccatgccgccttctttaacgttcggacatgaaatattcaactcgataccgggaatcttgtctaaagcattaatcttttctgtagtagcaacataatctgctatacatgaacctgaaacattcaccaatatatttgtctgaacatctttgatttcaggataaatatgctcaataaaataatcaactcctttattttgaagtccaacagcattcaacattccagaaggagtttctgccattcttggataaggattaccttcacggtgttttaaagtggtaccttttacaataaaaccacccaaacgattcaggtctatgaaatcctggaactcaattccatatccaaatgttccagatgctgtcaaaacaggattttttaattgtaatccacgtgttaggtttatatttaaatctgccatttcaaatcatttatattaaatattggaccatccatacatacacatttgtgtccttcttttgtgtcatttacacaacaaagacaagctcctataccacaagccatcatattttcaagcgaaacttcgcagtctatatgatgcgtataagcgtgttgtgctatagctttcatcatggggagcggaccacaacagaatatgtgatcaaaatgctcttttaaaatagaatgttgggtaggatatccttgctctccataagttccatcctctgttgtataataggttggagcgtatttttggtattcttcttccagtacgatatctttcttactacgagttcctatcaataccactgcttctatcttcttttttttcaattcctttgataaatgcaaaagaggagctatgccgacaccaccgcctacaagtaaacatcttccctggaccggttgcgtaaaactgttaccgagtggaagcactatgttcagtttattccccggtgtgagagtcgataattttgctgtaccggaaccggctattttaactaataaataaagtaagccattggcttcatctacatcatgaatggatataggacgacgtaaaaaagtacttggtgaatcttcaacttttacattgacaaattgtccggcttggataggcggcaattctgttgaatgcaatacaagaagaaaggtgtcatcattcaagcgtctgttttcttttacaatgaaatcaataatctttttcatataagagtgattgaaattaatttttagccaatttttcttttagataataacctgtatatgaatctttacaatttagcaactcttccggagttccctcgaatatgattcgccctccctgatctccaccttcaggtcctaaatcaattatgtaatcagcacactttataacatcaagattgtgctctataataattacggaatgtccccggtcaatcaaagcgttaatggaatccataagtttatggatatcatggaaatgtaaacctgtcgtcggttcatcaaaaatgaaaagggtcggttctgcattttcacggctcaaatggtaggcaagtttcaccctttggctttctcccccgctaagtgtacttgaagactgtcctaattttatatatcctaatcctacatccgctaatttctgcaatttgccgacaatatcacgctcacaacagttattactttgagcaaagaattctaatgcctggttaacagtcatttcgagtatatcataaatattttttccattataaagtatttccaatacatcatttttaaaacgcttgcctttacaatgctcacattctagatatacgtcggccataaattgcatttccactttgatgatgccttctccctggcattcttcacaacgtcctcctggtacattaaatgagaaatgagacggtttgaatccttgaattttagctgcttgtgtatccgaaaacagtttccggatatcatcccaagcctttaaataggttacaggattggaacggctggattttcctatcggattttgatctatgaattcaatacctgcaatttgattcaagtcgcctgctaccttgtcaaaactgccaatataagccggtgtgtctccaaaatatctttgcagagcaggaacaagaatcgattttatcagtgtactttttcctgaaccactcactcctgtaataacagtcatcacttttaaagggaaatcaaccttaatgtttttcaggttattttctgttgcaccggaaagcgtaagcttatatttccatggacgacgtttgtttgaaacttcaatttttttgcgatgaaaaatataatcagcagtcaaagtgttcgccttttgtaattgttgcatatcaccttgaaaaatgacttcaccacctaaacgtcccgccagaggaccgatgtcaattacttcatccgcagctttaataatgtcttcatcgtgttcaacaacaagaacagtatttcccagatcacgtagtttctttaatacgtgaattaatcttcctgtgtctttcgaatgcaatccaatactaggttcatccaatatatataaagaaccaaccaaagctgaacctaaggatgtggctaagtttatccgttgtgattcgccaccggatagagtagaggataagcgatttaaagtgagataacctagaccgacttctaataaaaagtccaaacgattttgaatatcaggcaatatcctttctgatattttctgctgaaccggagacagggctaaatagctaaagaattcttttactgcatgtattggcatatcaaccagatcggtgattgcttttcctccaatctttacataagatgattctgcctttaatcgtgagccatgacaaataggacaggtcgttttacctgtatacctagatatcataactcggttttggattttgtattttttagattctaaataagcaaaaaaatcattgataccgggaaagaaagaacagccattccacagtaatgatttttcactgtcactcaactcatagtaaggagtatgtacagggaaattgattttgtgagcatttcgcaatacttcttttttccattcactcattttttctcctctccaacacatgactgcatcttcataaacggataatgacttattgggtattaccagattctcatcaatacctaaaattttgccatatccttcacactttggacatgcaccaatgggagaattgaaactgaacatattgacagaaggctcggtaaattgcatgccatctttttcaaaacgattggaaaacgaacggatttctccatctatttcgataaaacaattgccattgccttcatagagagctgtttctattgattctgtaatacgtgatattgtatctttttctaaatcaatgcgcaatctattgattacaagataaacagaatcttcgtcagataaaggagatccagtatttagtatatcatctattctctgataattatcattaatttttacccttacaaatccttgctccataagaagtttcaatgttggtaattgagatatcttatccggacaggttaatataattactgttttcccaacatgcttcagaataaactctacaatatcatctacagaatctctttttacttcatcacctgagattggagaaaacgtttgaccgacacgggcatacagtagcttaagataatcataaatttcagtagaagttcccaccgttgaccgaggattagaactattgaccttctgttctattgcaatagcaggagggatgcctttaatataatcacattccggcttattcaaacgaccaagaaattgacgagcatatgcagacaaactttctacataacgacgctgtccttcagcatataatgtatcaaaagctaacgatgatttgccacttccggaaactccagtaaccacaatcaatttatttaaactgatttttagattaatatttttaagattatggacacgaattccctttaaatcaatatattgattagtcatataatatctccttttcgaccaacaaagataagaaaaatgttagagcgcaaaaataaaagcacccaagaaagggtgcttttagtgtttggaatatgtttggaaatacgtttatagtccgttaatgacttgttttaattattcagaaactacatcaaactgaacatcaactttaacttcacggtgaagtttaatgatggcagtataagttcctacttctttgatttctttcagcatgattttctttctgtcaatatcaaatccttgagctcctaaagcttctgaaatcatgatattgtttacagaaccaaaaatcttaccggtactgctggtcttagcaccaacaactaatttgatctcagccaattttgctgccaattcttcagcttcagcttttaatttagcttctttatgagcacgctgtttaacgttttctgcaacaattttctttgctgcctctgtagctaaaattgcatatccctgaggaatcaggtagttacgaccatatccaggctttacattgatgatatcatccttatgtcccagatttgctatatctgtcaataatataatctgcatttcgtgtcctccttttaattatttcatcaaatcagtaacgtagggcaacaaagcaaggtgtcttgctctttttacagcagttgcaacttttctctgatatttcacagaggttccagtaattcttcttggaaggatttttccttgctcattcaagaattttttcaagaactcaggatctttgtaatcaatgaatttgattcttgcctttctaaagcggcaatatttcttctttttaacatctaccgttgggggggtcagatatctaatttcactttcattctgtgccatagcttatttctcctcttgtttagctgcgtatttacttcttctttttaaagtatactcgtaagcatacttgtctaatctaaacgttaaaaaacgaatgactctttcgtcgcgtctgtaagctgtctctagtttatcaaccagtgatccttctgcttcaaactgcaacaagtggtagaatccggtcgtttttttctggatcggataagccagcttgcgaagtccccaagcttcttcatgttcaatcgtaccaccattagcagtgatggtctccttgaatttgtctaccgcttcctttatctgctgttcagataaaacgggagttgtaatgaaaacggtctcgtacttgttcaacataattaattgattattagtataaaaatattttatcgggcgcaaaggtacatattttacatgaaaccaccaagcatttgttctatgaatcatcggtaaattttcattctatttaatgcacgatggtattctgctgcatgtttattatgctctctcaatgtgcgcgaaaaatgatgtgatcctgaaaaatcacttttcgcacaaaaaaacatatagttatgatgggtatagttcaatacagaatctattactttgggagaagccatacgaatagggcctggaggcaaacatgtattcttatatgtattgtatggcgaatctatttccaaatgtttatcaagaatccgcttgatcgtaaaatctcctaaagcaaattttaaagtaggacatgcttctaagcaccagcctttttttaatctattgatgtaaactccagcgatgacaggatattcatcaactttattagtctcttcttcgactattgaggcgatagtcattatttcaataggggagaagcccatgttttgggctgctgctattcgttctgaattccaaaatctatcatattctttatgcattctcttgataaaatcagcagggcttatggtccaaaaaatttgataagtattaggaataaacatactgatgaaattatttttatcaaaaccgtattgatttatgatattggtatcgccagccaattgcataaaatcagcagaatctattggaagttgctgcgataaaacttttgcaaaatcatttagagtcctaatattattaaatgtaaaattcaccgcttcctggtctccagaacgcaatcgattaattagttgattattattcatgccatcaacaatccgataacgtccaggctttatatagtgaggatatttttttaatgtggcaatttttctaaaggtgtattcattcttgaggtaatgcttgtttcgtaatatctgtactattgtttcaaacgtatcattcttttgaatatagataataccactatctgctacagtgatattaggcttctttagaaaatagtaatacgaaaatataatacaagccaacagtatgaggaggcaaagtaatatatacttgatatattttttattcttcattacggaaatatagcatataataattcatatctttctcaggatcatatcccttacggatatatttcttctctccatgtatatatacatggaagtttttatccaattttaatacatgcttgaaatactttttttcgtcctttacagcatagtttgaaactgtaaattcttgaggcagctcaacattattgtctgattcaaattgacatttgaaattttcaaaagcattaatcacctctggctcttgcacgacttcttctttaaaccggtcttctgaaaaatagttggcatctttaaagaaattaatagagcgatttagcatatctatctgatcggcacgtggcacatcattttcttgattatatatttccttcacaaagtttttgcataaattcaaatagtttgctgtttggaaatagctatcatcactaggttccaaaccaaggaagtcattagtccaatagatggcttccttggcatttgtcttatcaagaatacatgctttatatccttgttctcgattgacattaaatacaatgcaagccttatctaatttttttatattaatacctgattctcctaccaactgatagatattttgattcattacaatcttcaagaaagtatctttcgtttcagatttgaaaataccaatggcattacatacaccttcttcaatattgcaatttttaaaatggacaatataaagttctccagatttaatattgggattattggattgttcaaataaatgctgtgctatttctacggactgctggtaaaactctaattcatcatcaaatatccgcgatacagatgcatataccggattatttaataattcattttcatatggcacaaaatgatagtaagcatcttttttaaatgccgacaaaaaataacttttcagtaaattcagcacatcttcatcttccggtaaaaaacaatcatcagaaagaatcaaatcaccactctcaaatttattaccaatactgtgaatgattatattagatatttcgcaattttcaaaattaatcatctaatctgattttaggtaagttaaaatctaaattttacacctagatttaagttttccttgaattgcagttttctggaaaaactctcatcgtatattgtttcggtgtaaatagaggtcgtcataaaatagttgattttaaaatctattgtcattttccaattaacggttaatggcaatcttttcttcatttcaccactttcctcttctgttatatatttatcttttttctcgtaactcaagaaaacctttagttcattattaatattcaatattttgaagagattatttaatttactgatcaagttaacttgagcaccagcttcacgtttaaagcgtttgccggcttccgtaattccatagcgtttaggagcaatcttcgacgaatccctcacaaaagtccatttcccagctatcggagagatgaccaatgagaagttactattaggcttataatccatacctaaagaaagagtaaagtctcctggactcataaaattagcaactaattccctcggtttatctttgggataatcataagaattgaaaagttgggtaaccatattaaactgtgcggtatagtaccaatgcttgaaggctttttggccaaccttggagttcaactcaaatcgatcttcattctttcgcatttcctcctcaccatttttcataaaaccgaaacgataatgcatccaattttcccaacttgtcttattgcgattataattccaataatagcgtaaattactgatcaaagaaagagagttttctccaccacttgaccagttctttaaagcaccttgactcatcgtcaactctacctcagaataatatgtccaataacgacgttttatatccggaacattacagtccattgaaataaaatatgtttcacttggagcattaaatatcggtgcttcttcatcttgataaatttgctctatcatagaagtttgaaatacatcttcatcaagatagatttttattttattacctttaggcattacttgtacccaggtcccgacagtatcacataaattatttccagcccaaaaacgataatactgcagtttaccattattcatccaaaatttaataggcgaattattcgtacttgtcagttctatgaatacagaatctctatcagcgtttctcaaccacaaataattctgttctgattgaatatattttaccaataattgcaaatctgtatttaaatactcctcataatcacctgataaaagagatttcatattgtcaatatattcagcactatctatggttatatattgctgcaatttacacaatgctttttcttgatctggaatattttttcgagcataatttctcaaaaaattggttgtatactgaatattctcactatttatatagcgtattaaagtagcaacagcatggtttaattctgaatcttcataattttcagatttgatatcctgaattgcataacgagtagcaggattagctatcaatgagtatggtagcggtatttgtctaagatttttttggaaaggtggcaatacggcatacttactctgcacaggtagaattattgattgcggttttgccaacacaacagaactatcgacttgtgcccaaagaggggatatatacaataaaaatactaacgatataactagcttcatagattgaaattatttgaagggtgaatcaggttcttttgccatatgagaataactcaatttatccactaatgacggccaccatttgcttaggaatacagctactttcccttcaataaaagtcataattatttctctttttctttttgaaatacccttaacaataatggaagcacatttttcggctgacatcatattaccctcatttctaggactctctccttgttgtccaccttgtgcattaagagctgtcttacgtatatttgaagctgtaaaaccaggagctgctactaatacatgcaacccttttttgcgattttctattcggactgtattaaggaatcctcgaacagcaaatttgctagcagcataacctgtacgtcctggtaaccctataaagccggctatcgaaataatacccaccaaactaccttttgattttaaaagataggggagtgcatactttgtacaataaacagttccccaaaagtttacatccatcactctgcgcaacacatcggtatctaaatcttgtagtaaagctcgcatagaaataccagcattatttattaagatatcaatatgtccaaaatgattataggcctgctcaatcaaggctttacaatcttcttcgtttgtaacatccgtgcgcacggccaaactctcagtgcctttgctttttaaatcatctacaatatgatttagttcatctatatttctagcagccaccactagttttactccatagctagctaactcatacactaaagctttgcctatacctgaagaggctccggtaataattgcaactttatcccgcataatataaaatatcagtcattaaattaaagtgcaaatatatatttatttcttcattaattcaaagcttataggagccaaggttaataagaaaaataatttatattatgtaaactacatattcaaaataataggaagaatattatattcttcctattaataacttattgtatattatcaagtttagctttcattacatcatatgcttcttgatatttgggatctttatttctcagcttaaaatacaattcttttaaagttgttactgtattcttttcatcaggatttaattccaatgccttttcaaaatatggaataactgattcgtaaccttcaaatactttttccatttctttgttgtattcatttacatcagcaatatccaaaacttttttatggaattcaataactacagataattttatatttccaagattatattgagctaagaaatctttgggatccaactccaatgcttttacgtacattccttcagctttttctggctgctccatcttttcgtataatgtacctttcgctctataaaatgatgcatttttaggatcttgcttaattgcagcatccaagtatacttcagctttttctggttcgccgcctaataaatagtagtttatcaattctactaacatatatgagtcatctggatataattcataccctttatgcaaatatgttacagcttcttcttctttaccttgatctttcagaactttcgacaacatagcatatgtacgagcagcctcataatcatacttcaatgtctccttataaaatttctctgcatcatctaagttaccagctctttgagctgcaactgctgcattaaatataacagcagtatcaacttttgctgactgtccttgtgttacaattggtgaatgctcaagttctagaacttgtttgaatgatgccaatgcttctggaaatctttctgcattataattttctacagcttgatttgtgaagtcaataattaaattactatattgagtagctaattttttttcatattttttctttacatccaactcaataaccttttgaaatgctttccaagcaatatccaatgcatcagcagataagcttttgtattcaggaacttgactttcaaaaattgcttgataaatctggcctttcacaaaatgtgctttatcaaagttgatacatgcttcatgttgaattgcttcatcaatcatcttttttgcttgatcaagttttcctgcagtaaaataactctgagcttgagttacttttcctttctgtgcatatgtgaaagttgcacagaaaagcaacataataataatagaaaattttctcatacgtttaaaatttaattacagtattctttttattcaacggttttatctacattgtcattcgattcctctaaattctcctctactgtagaactttcttcatcatcatccttagcagcagaaactttagcaacagcagcaatagcatcatcattctttaagtttatcaaccttacaccctgtgtattacgtcccattactcttaaatcagccacattcaatctaattgtaagtccagagcgattgataatcattaaattgtcttcatcattaacatctataattgctattaactcgccagttttttctgtcatgttaatagttttcacacccttacctcctcgatttgtaattcgataatcctctattgcagaacgcttaccatatccgttttctgaaactactaaaatatttgcatttgtaggttctacacataccataccaacagcttcatcattttcttccatccatatacctcttactcctgaagccgtacgtcccattgggcgaacttttgattctgggaatcggattgcacgccccgattttaccgcaatcataatatcattttcgccatttgtcaatttcgcttcgagtaattggtctccttctttaatcgtaatagcattaactccattttggcgtggacgcgaatatgcttccagtgttgttttcttaatgatacctttctttgaacataatactatatagttactattaatataatcagtatcttttaagtccaacagattaacataagcttttactttatcatcaggctcaatattcaataggttctgaattgcacgtccttttgattgcttcgttccctctggtatttcataaacttttaaccagaagcatttacctttttccgtaaagaacaacatggtgttgtgcattgttgccatgatcatatgttccaagaaatcttcatctctagttgccgaccctttagaacctactcctcctctattctgtactttgtattctgaaagcggagttcgtttaatataacccatgtgtgaaattgtaataaccatttcttcatccgcatagaaatcttcgggattaaattcctctgaggcataaacaatatctgtcctacgtgaatcaccatactgtgctttaattgccagtaattcattttttatgattttcattctcaattccacgtgttgcaaaatatcatttaaatgagctattaatttttcaatttcatcatattctgcccttaatttttcttgctcaagtcctgtcaattgtcccaaacgcattgctacaattgctgctgcttgtttatcagtcaagctaaagcgttccattaatgagttttgagcttcttgaggatttttcgatgctctaataattctaattacttcatcaatattgtctgacgcaataatcaaaccttccagaatatgagcccgatcttctgccttacgtaattcaaattgcgttctacgcacaacaacttcatgacgatgctcaacaaaatatttaataatatctttaaggtttaacaattttgggcgtccatgtactaacgcaacattatttaccccaaaagaagactgcaaggcggtatgttttaacaaggtgtttaatacgacatttgagatagcatcttttttaatatcgataacaatacgcataccttcacggtctgattcatcgtttacattagaaataccctcaatcttcttttcattaaccaactcagctatacgagaaatcaattcagccttattgaccatataaggaatttcgtgtacaataattttttcacgaccattgggcatcacttccacagaagtttttgaacggataacgatacgtcctcgtccagtaagatatgcttccctcactccattgtaaccataaattgttcctcctgttggaaagtctggagcattgattatcttaataagatcttctatatcaatatcattatcatcaatataagcacaaatagcatcaacagcatcactaatattatgtggaggcatatttgtcgccataccaacggcaataccggaagctccatttactaatagataaggaatacgagttggtagtactgtcggttctttaagcgaaccatcaaagttgtccgtcatatcaacagtatccttgtcaatatccacgagcatatcctctgttattttagccatgcgggcttctgtataacgcatagctgcaggactatctccgtctaccgaaccgaagttaccctgtccgtcaaccaatggataacgcagcgaccattcttgagccatacgcaccattgccatatatactgagatatcaccatgtgggtgatatttaccaagcacctctccaacaattctagctgattttttatatggttttccagatgtcaagcctaattcatccataccataaagcacacgcctatgtactggtttcaatccatctctcacatctggtaaagctctcgctacaatcacagacattgaataatcaatgtatgaagatttcatttcctcttcaatgttgattttaataattttttctccgccgttttccatctaatattttaaattactgttaaccaaaacaatttaagagaagctagtttaatcattcttctctacaaaaatctcacaaatataatgatttcagtcattataaaaagaatttacctttccttttttaaacttctggaatcattgttacaaaagtgtcataagccaatttcacattaggaggtaactccttagcaacttcagatgctaaacccatttggtgaccaatatgagttaaccaggcttgctttggcttgattcgttttatggcatccaaggcctctgataaattaaaatgagataagtgttcctctttacgtagagcatttaccactagatattcaactccacgtagtaactcaaaagatgtttcaggtattgtttttgcatctgtgatataagcaaaatttccaatcctaaatcctaatacgggcatcttataatgtaataccggaataggtatcactttgatatcatcaataaaaaaaggtgagttgtctaatgtatggtaagcgatttctggcacaccaggatagcggaaagctgcaaatgcataagaaaaatctttataaacaacatctctagtttcattacttccatatacgtctacagcaccttgttttacccagttaaatgctctcacatcatctaaacctccaacatgatccttgtggccatgtgtcaacaaaatagctcggatatcctccactccacttctcaacatttggtatcgaaaatcaggacctgcatctatgatgatttttttacctttaacctcaagcatagcagaactacgcaatctcttatcatgcttatctgccgacctacacacatcgcactgacaggctataaccggaattccttgcgatgttccgcttccaagaattgtcaatttcatcttaatctcaaattatcttcacaaagatacaaatattacaaaattgatactacctttggagagaaataaatgttacaaactgataaaatccatatgggtaatttatttttaataccgaatacactcggtgatacagaaatattgggtgtgattccatccgaagcgataaaaataatcaagcagattaaggtattcgccagcgaaaaccccaaaaacactcgccgatatttgaaaaaaattgataaaggcataaatgttgatgaacttacatttttagaacttaatgagcattctgaacgtaaagatgttgaggtatgtctttcttggttagctaacaacgatattggtattatctctgaggcaggatgcccaggaattgccgatccaggagcagaattagtcgctttagcgcatgcacataactatcgtgtaataccattagttggaccatcttccatattattagcgttaatcgcatctggatttaatgggcagaatttttcttttaatggatatttacccataaaagcaaatgaacgtactcgtgctttaaaaaactatgaaaaacaatctgctgcagaacatcggactcaaattttcatagaaacaccttatcgaaatctaaagttatttgaagaaattgtacaaactcttcatcctacaacattactttcaatagcttgcgatattaccactgaaaatgaatacattaaaaccttaactattcaagattggaaaaaacaaaagccagacataaataaaagaccagccatattttccatttatgctgcaaaataaaaaaaacttcctcgagctttgaggaagttttttatttggactttaattcgttttccttgcatccaaacgtcgcactacttgcccataaataattaaagcaatagcagatattaaagcaatcccagcaaaataataccacaaatataatgagcattggcagttgcagccatccattcagcttctgtatcaaacaaagctctgtccggacaatacttacttaacaaaaatcctgacaaaccaaaaccgaaaatcgatgaaagaaatgaatgtaaatgactaaatcctaaatacataccctcttcacctttaggagcttgtaatgaaaagtattctaaaaaacgtggagaaataaacacttcggctaatccttgaaaaataatacccacaatcatcataaaagcaactggatgcattccaagaatatgttcacctcctaacatatttcctgaagccatacaaagtgctgatattggcattataaacataccaacagtcattgaaaacaatgctgatttttttctcatcaattgagcaattaaattaactgtcaatacaacaactaatggattgacattagcataccaacctattgcactaccttcacctgccaaacgaataacatatttcggcatggtagcatacaattgatgttgcaccatccaaaaacccgtaattatcaaaatcaaaataattaaacgagcattagaacaaacctttaataatgaattccaaatttgacggaatgtctttccttcacctgcgtgttgatcacttttatacaataaatatattgctattaaagcgaggaatgtcatactagcagaaaaataattcaacacaatcattccttcatgccctaaactgtcacgtaacggtgttaccaaaaccttaccagaaaatgctccaatatttaccatcccataaaagatcgcaaatccttttgcccggttattttcatctgtttcttttgcaacagttcctgatattacacttttaataaaggatcctcctactataattaaagccataataggtaaaattccatatctatatccacttgactgaaggccattaaattttgtctggtacccgtactctaccaatcctgttgattcaagagaattaggaaatagccccaaccctaaatagcctaaagtcaaaaaagtaaaagccaataacatagacttacgaaaacctatcttatcagctaatgcaccggagaaggtcggcaaaaaatataaacaagcagaaaatataccggcaatggttgctgcttgaacatccgaaaatcctaatacattactcaaatataacgtaattactacaaatactccgtaatacgtagctcgttccaataattctaccgtgttggcaacccaaaacgctttcgtaaacttcactttctttttctcatttgttgtcacactcatactctcaatttatttgttaatactaaatcatctgctcggttgtatcccctataaatttatctgcaaaaatccgtgcagcataactctctggtataaaaatctttccaatgttcatcgcatctaatatagacttgtgcacatcatccaaggctcttgcatatattttactgattttcaaagcttttaatgcagccactgtacgcaaagaattatccatactctgacctatcgctacaatagcacaatcaatatcttttaaaggtaaagtagataaacttatttgatctgtagcatcaagaatataagcgacagatattctatcttttacctcctcaactcgatgctctaaagtatcaacacctataacatcatggccattgtcagttaattcctcggctaaagtcctgccgaaatttcctaaacctatcactagaaatctcattttctatatattagtttattataatattatctttaggtaatctatagcgtaaacaaccggaaggtttcataatacttgtcataaaagtaataagtccaactcttcctgtaaacattaatagagccaatagtaccttactctcatcacataattgtgatgttacgtttaaactcgaaccaacagtacctaaagctgaaaccgtttcgaaaaataatcccaatggagtgattgctggttctattgctacgagtagactaaaaaagattataatcgcaattatagaaccaaaaaccacagcagatgctcttctcacagaatctcctgccaattcacgattaaataggacaacatttgaacgtctacgtactaccgaaataaaatttgcccatgccactgcaaatgcatttacctttacccctccggctgtagattgtgaagctcctccaacccacattaaaaaaatatacaccaccaatgttagtaatgaaaaatccgtaagcacaacactattaaagcccactgtacgaggaactactgcattaaaaaatgcatgtgtcaatttttgttctgtagacattccggaaaaagctccatcccattcttgtaaagcaatgaaactacaactaccgaccagtaataccaacgtcattgtaagaacaatcttagtatttatattagtcaaatgattaaaacgagtatgtttgtccatttttaatacccaacgtctccataaagcctgtgtatggtaaattattatattcttaaaattaaccaatataggaaatccaatgcctcccattattacaagcaaagaaatagtcaggtaaaataaattgcttccatgcatcaaaataggattacctaaatttcctgtcatggttgaaaaaccagcattacaaaatgctgaaacagaatgaaataatgcaaaaaatatctcctcatgcaatgataaatccaaactagaatgtatacacatccaaataaaaactgcacctatcaactctatgacaaatgtaaaaccaaaaatatacaaaagcattgaaactaaagatgctgaattgtccgagccattaatcatatcacgcagagcaaattgattataaagccctgtgttacccataaaaaacatggcaaaaaaactcgtaatagtcataactcctaatcctcctatttgtatcaatagcataagaattatctgcccttctcgagtaaacgttgttgcaatatctacaggagaaagaccggttacgcatacagcacttgtcgatacgaacaatgcatcaataacagacaaacgtatatgtgcaactgtcgaacgaggaaccaataatagaatagtaccgacaaaaataatagctgcaaaactggctgctaacaatagcgcaggatttgtatttttattaataaaactaacaatccccctagatacatccaaaacagcaaatatccctactaaagctgctgtatagtaagtgctttctaaaaaatcccaaagccatggcaacaatgaactttcacctgaaagaccaaataggcgaggaaaagttgaaaggtaaagtaatacacctaacaatatatgtgcagtcaacaatttcctgcttatgctcaacaatccacacaataatctgcctgaaaataagataaaatatatccaccaagcaaaatcatacacccctaagatgtaatttgcttctttctcatcaagtgcaaacccataatcaatgataattgcaccaagcacaagaacagatagtataaaaacaaaaatttcaatccagaaggctattctgttttgaaaagagcgtgacattatccccgcaatatttttttatcatttctaacatgcttgcaaagatattcttttgtgtggaatataaaaacagagtccggtaccagactctgttttcaatattttaatgccaattcaattatttgaaatatctgttatacagaccttcaaatcctttaccatgacgagcttcatctttacacatttcatgtacagtatcatggatagcatccaaattcaattttttagccaaagttgcgatacgttttttgtcttcgcatgcaccagcttctgcttccattctcttcttcaagttagttttggtatcccaaacacactcccctaacaattctgcaaatttagcagcatgttctgcttcttcccatgcataacgtttgaatgcctctgcaacttctggataaccttcacggtcagcctgacggctcattgccaaatacattccaacctcagtacattcaccgttgaaatgtgcctgcagaccttccaatacttctgcgtcaacaccttttgcaacaccaattacatgttcgtctacgaatgtaagagcaccttcattttcaactaattctttaaatttgcttcttggcactttacattgcgggcaaaattctggagcttcttcaccttcataaacataaccacatacggtacaaataaactttttcataacaatctgttttattgattaataatattttctggggttaatcccaacgttttatttctacattctttgcaataacctttatagtacaggtgactttctgtcacttccatctctcctattttcttcacctgcaataaatcattatcttctacagcaatatcaaaaaccttgccacacccacaacattgaaaatgtgcatgacaagatgtatctatatcataacggatatttttttcatcaattaccaaagctgtaacggctttttgctctacaaatattttcaacgtattatatattgtagtttttgacaatgtaggcattgactgatataacgcactatagatatcatctaccgtaggatgaatatgatgcgccataagatactccataatagccatcctctgaagagagggctttatgccatattgctgtaagtatttttgtgtcactaaattcatattcattataatattataatcattacaattttttatcaagtacaaaagtagactatttttttataacctccaaattattccgatataatttatcttataaaaccagtttgttttcgttaataaatttatagctttgcgctatgttttttttaggagcttcagcgcatttatttatttacctgctgatacccgctttcatcattgtatgttgctattgtagaggcgttgcaggtactccggaagtgaactctgcacttgcggaaattgttgcatataaatcttgtcataattcctctgaaaaactaacatgcttttttcaagcagaaattaaaaaacaacgaaaacaaaaacacatatttattttttacgaaaagagtaatgatatcatcccttattttgcagatatatattactcccctattacccaacaattacatctgagagccccacctacctggctatgatctataaatacaagccgtcaatcggcatcttttaaattttctaactataatatattattgtatgcacattatattttgtataatatgtacactattggtatatagtgtatcagcacaacgttctgcttttataggaaatgactcaacctacaatatggtacgagagcttcaggaagttattgtcactgcagaaaaacgacaattgaatcctgtcaatatccccacagctttgactgtagttactcccaaaatcattaccggtgaaaatagtttggatctacgtaatatttcaggtatagttcctaatttctacatgcaagaaggtggattaaaattatctacacctttatatgtaagaggtatcggtacgatatctggaataccctcagtggggctatatatcaatggtgtacctgtatttgataaaaatgcatttatatttgaactctatgatatccaacaaatagaggtattaagaggtccgcaaaccactctctacggacgtaacagtatcaatggactcatcaacattaataccaaaactccccatagtaaatttgctctacaagccggcattggctattccagttattcttctcaaaactatagaataatattaaatttacccataaaaaattattacaaccggttgtctttttcctacaacaaatctaaaggttattttaaaaatcgatatgaaaacaataaaaaatcaaatccatcagattcttatcacatcagataccaaggacgggtactgactcctctgaattgggatttgaaacttggtgttgaacatagccattcttacgatggtggctatgcatatgcagctgctgattcattaagaaatgagagatatgtagttaattacaatacaccctcctcatatagcagaaatttgactgcagcacacatcaatctgaacaaacgctgggaacaacttaatttctcatccgttagttcttatgctcatacaaatgataaacagtttttggatgcagattttacttgtttagatgtttttgataatcaaaaaaaatcacatcaacatctatatacacaagaagtcacactgcaatcctctcaaaaacaacgtatagaatggacaattggagcctttggcttttacaaagatcttacgaataaatacattgccaatttcgggacagatcgtttttatttattacccatgaaattagaccatgccaagtactataataacactaccacttggggaattgcaggatatggccaagttgccatacgggatatatggccagggatgacttttactgctggattgcgttatgactacgaaaaaacagaacttgattatcgtgatagtctgctattcagtggaagtgaacaatatagcagctatcaccaatcaaataaaaaacgtgattttgatgcatggttgccaaaattttctcttttacagcaatggaactctcaattatccctctacctcagtatttccaaaggctataaagctggtggatataacattatatcaaacgatatgagtagccaattggtacaattgcaatataatgcagaaaaactttggaactacgaaatcggaatgaagtatttcagtcaaaaccataaattcaatttaaatgctgcagtattctttattgattggaaagatcaacaaatatttaccatgggcatgatgggaccagccctgaaaaatgcaggagatgcgcatagtgttggttgcgaagttgacatgcactgggagtttattccttgcctggcatatttcctatcaatgggatacactcatgcccaatactaccacaatgcaaataaagcccatgaaggaaaccggattgtaatggctcccgagtttaccggaaatactggtttacgctataataaaaaagtaaatgtttcttggttccaatcattttctgcctccacaagtgtcaatggattcggaacccaatattttgatgaagccaacctattaaaacaaaaaccttacttcttatggaatctcgactttggaatttctgccaaacattgggagtttaaaatatggggaaaaaacatacttgacaaagcctttttctcatatatgctaaacaatcctgttggcaacaaacttccacagtacaataatatgggacaatcaggagctcctgcacgttttggagcatctatcacatttaatatttaatttaatataataatcatatgaaacagattatcagcataatatttatagcaatagtaacccttcttaacctatcttgcagcaatcaggatgaaccgacagacaaacttgccggtacatattggagttatcaaaaaccgcattttgaatttgaatacgccacagatacaatcgtttttcaaatgatgcaaaagcaaataaaaataggtgtcaaacaactaaaaggcatgtttacagctatagcccaagaaaaaatgggagcttattttaaaggtatcaattttcaagatcatcagaacctagtgctagatatacaaaacaaacagcagatacctttcaaaattcctgcacaatacatgtgtgatgaaaactatttacaattgacggtaaacttaggaaatatgctatccggaatgaattttcccatgaatggaattcctcctattagtttcaaataccatatagaaagcaaccagttgacaatgtattttgaaaaagtatacatccaagtaatttattctatcatgagcgattcaatagtatcaatgataataaaagcgatgggtgtagatttcagccatgcacctgaaggcatggaagaaaaggcaaaacaagccatacaaaaacaaatcaatgatattttccaacaaacccaacgcctggagcttggatttgtcttaggtataaaataatatacggaataaaaaaaatattcaaaataaaaggttatctttaccctaaagaagttatacacagaatttgagtagaaccttttaagataacctatgtatatttatttagaatactaaaatcaagaattatgaaaaaaacaaattgcaactgcggactgctttcatgcgaagcggtcaacaaacgggataaagacaaaaaatttgtattagtgtctcttccttataaagaagatgctttggaaccattgattagtgcgaagaccttgcaatatcactatggtaaacacctggtagcctatatcgacaacacaaacaaacaaaaagccggtactgaatttgaagacttacctctgcatgaaatcattcaaaaagcaacaggtggtctattcaacaatgcagcccaagtgttcaaccactatttttattttgaagcactccatgctccaagcatagaattgccacaaacaaaaatgcttcaacttatcaataaaaactttggaaattttgaaacattcaaagaaaagtttactcaagcaggcaccaccttatttggttccggctgggtttggctcgtacaagatggtgaaaaattagaaataatagctctacctaatgctggtactcctatccaagaaggtaaatatccgcttttgacaatggatgtatgggaacatgcctactacttggacactcagaatgcccgtcccaaatacattgaaaacttttggaaacttgtaaactgggatgtcgttgaacaacgaatcagataaaacaaaaaaagcgtaatgacaatcattacgctttttttatcattagaaaaatttacttcacaataaccatttcatcaatcaaatggcgagcacctgccagtttgtctataatgaaaagtacatagcgaatgtctacagaaatattacgacaaatttctgtattatattgaatatccgacatcacaccatcccatgctctatcaaaattcaatccaattaaatgaccctctgcatccaaaaccggactaccagaattacctccagtagtatggttggtagccacaaaacaaaccggaacttctccatcttgcgtataaggtccaaaatcacgctgacgataaatctcccgtaaacgttctggtacattataatcataaatattaggattatccttctccataataccattcaaagtagtataatgcttataataaacagcatcacatggtgcatatccctgtactttaccataagcaactctcaatgttgaattggcatcagcataaaacactttttcaggctgcatctccatctgagctgtcaaccatgttttatccatacctttcaactgattctctatcgctgacaattctggagctatttttgcaacatacaattgatcaatagagctatacagacgataagccggatcttttgctaatttcttataagattctgcatcacaattgtctatgaatgccatcagttgactttcatttgcaaaaattgattttgcaaaaacattggttgcataagcttctacacctttcttggtagcagcagcttgcacctctgcaggtatccattctactgttagatttttattatacaaacgcaacatttcagcaagaatcttctgatcggtagctgcatcataatctttaaaatatccttttacgtattctttcaaaacttctttataatgcttctctttctctgcaaaatctttttttgttacaacattatacactgcagcactcaaaccaacgatttcagcaccacgtttaccggcctcagtcaaataagaaacggctaacaccaaatcttttcgcttatcatacaaacttttataagtatccaatagagtgctgtactcttttttacctgcagcccactgacggaacttagcctcttcttgacgttttgtctcaactgtattgaaacgtttcagacctttagtctctccttgccattttttccaagcatttgcgacactggctgctttagctgcatacttgattcgtaataattcatccgactccatagcagcgttaataatattcagctttgcagtgcgaatagcaatcttatgtggattttcaacatcctgagtctgttctatcgcataggaagtcaaatattccttcgtcgttccaggataaccaaacaccattgtaaaatcgccttcattcaaacctttcattgaaattttaaaaaacgatgcaggagtataaggcttattatcgggagaataagctgccggttcattatccttgccggcataaatacgcaacaccgaaaagtctcctgtatgacgtggccacatccagttatctgtatctcctccaaatttaccgattgctgatggtggagcaccaaccagacgaacatctttgtaaattttgaatacggacataaaatattggttaccgttgaaatatggtttgatattagcttgcagatttgttccctctaccgcctttttctccaattcactgcatacttccttaatcttcttactctgctcagcttctgtcattcctgctttcaactgagatttaatttgctctgtcacatcttccatccttactaaaatagaagcagtcacccccggatttgccaattcttcctgcttatttttagcccaaaatccatctcttaaataattatgttccaaactactatgagactgaatcatatcaaaagcacaatgatgatttgtcaccaccaacccctcattactgattaattctcctgtacaaaaatgtgaaaacggacgaccttcttgtcctaacccgattaccgcatccttcagtgatgcttggttaatattgtagatatcttcagccgtcagcttaaagccctgcttctgcatatcttcaatattatactttttaagcagcattggaatccacattccttcgtctgcccggcaacctacccacgctgtaagcagggccatgaagataatgattgatttttttttcatgaaactgtatttagtattaaaaattcttcagcttttcatacaactgctgtataggaagccccattacattataaaaagatccttcaatacgttgaataccaatatagccaatccattcttgaataccataggctccagccttgtctaaaggtctgaaattgtcaacataatagcttatttcctctttcgacagctctttaaaataaacgtctgtcaaagatgaaaaagatttcctacaaccttgagtggtcagacacacacctgtgattaccgtatgtttgcgtcctgataaatcctgaagcataccaatcgcctctcccctatccttcggttttccaagaatcttatccccaagacacacaactgtgtctgccgtaatcaacaactcatccggctgcaattcaccatgaaatgcatctgctttcaaagaagctaaatattccggaaccttttcaatttccaattcggatggccacacttcttctgtcgatttcaaacgcacttcaaaagaaaaaccagcatctttcaatagctgatgacgtcggggcgaaccggatgccaaaattaatttataatgattaactgcattcatcaaacacaaatcaaattaaaaggtattagacaaaaacatactggcaccgacacaagcaacagccagataccgaatcaaattcaactgcaaagcccgatttcccaatttaaaatttacagcccaaatataaataatataaggcagtaagatggcaacacccccataaagtataaacaaattagagcctttacattctgattgaaaggctatccccaacgaaataatcgcaacaacagccaataaagtaatcatacaacgggccactttaatccctgcttttacaggaattgtattaaatccgttatccttgtccccttcaaccgaaaagatatccttattaatctcatacatcagcgtattcagaaaaatgaaccatgcaaaaccgcatacccgccacaaaataaaaacgtttagtcccgtttcctgacagataattgtattcattttcaatagtaatggttcttcataggccacaacactgattggaattaacgccgctaaaagtcccactaaaatattgccaagcaaaaagaatcttttgaatccaaaggaataaaaccataataaaccggacacaaccaagaatgcaacccccaactgccattcccctaaaataaaaccaagcacaactccgattcctaccgcaacagcattcaaaatcgaatgcaaaataatagcagattgccgactgatactcttcccgataacaatattgcgcactcctgaaatcctgtcggattttatatcaaaataatcgttgataacgtatgccgccgaaatcagacaacaaattgccattaccaacaaagcaaaggcaaaatcgtccatttgcagtttgcacccatttaattcaagaactggccgaatcaccaaaagtcgcatagcatacattgtcaatactgcaaatgcaagcgttctgacccttatcaatcgaagaagctcaaccatgatgaatgctcattaactgtttacatacttttcacatagcatttagtatccatccagtcccctctagctttcaacacttgtgccattacatcccttacacaaccttcgccacctatcgtatctgaaatataccttgccacccccttgatttcctcacaagcatccagcggacacactggcaatcccacacgtgtcatcacattataatccgggatatcgtcacccatatacataatctcatctgcagttaaagaatatcgctccattatttcttccagagcttcaattttattgggaactttcaaatagatatcttctggtttcagtcctaacttttccatgcgttctctaaccccgggagcacctccgccagagatgacagccacaatatatcctttacggatactatacataatggcatatccgtcctttgtacaggaagttctcatcaactcgccttccggagtcagactttgagcctgtctggacaaaactccgtcaacatcaaaaataaacgcccttactttctttaaatcgtctttaaaaaagcccatattaaaagatttaatatcgttaaacttaccataacgacagcatttgcggcttatcgtcaggctcacatttaggttctatagacttcaacgttgattcatgaatagaatctgacatcaaattgtacaaatttagtaatttatggtcatctttcaagagattacgatgcattcctaaaatcgtttcatcccctcttcttgccggacctgtctgagctgcctcaggcgacaacaccatcaccttatgtgcagtctcaaaaatcagcggacgcaacataccgaaatcaattccctccttatctaaaatctgacctgcaatcccatacatgtgattcacaaaattattggcaaatacagcagccatatgcaacaccttacgcttttctgaagaaatctcttcaactctcgcagacaacatgccagccaatttcttcactacagccaaagcctcctcgtcatttgcctcaatacacaacggtatttccctaaaatccaactctctccttttagtaaatgtctgcaatggatacaacaccccataatgttggataaaaggctgaaacaccttcatcggcaaacttccggatgtatgtagcactaaagcctccttattgattctaattcgcttaaacagattcaataaagcatcgtcttttacacaaaaaatataaatgtcacaatccggataaatcgtagaaatatcagttgtatacgttatacctgttttttttccgagctctcgagccgattccggagtccggctatatatctgacacaaattcagtcctgctttcaataaagccggagccagatggctagccacatttccagccccaatcaatgcaattttcttattcatcatccttctcaaatgctatattcttagctttaaccttgccttcctttattaatcgcaacaaacgcttgcaagcagcacaaatatcctcataaaaaacctcacccaccaacaccagtttgccgtcgcaatactccaaatgtctataccgtccttccgaatctttatggtcaagcaacaataaatcccctcccggtataaacgtatgagtcatctgattacgcaatttatcgtaaagtacaaaattggtattcaacaatcgatatcgtcctccaaacagacaattcactccctgcgcaaaacgttttgacgactgaccttttgctttcatcggtttattatccaaaaaacttcccaacacctcaacagcctggcccatcaacacaaactgcatatatgcaagattgatactctgcagtttacctagctcctgtactatcactgtatcaagaaattcctctatatgtttaatctgttcttccctatccatagttaatggacaaaattaaagcaaaaattgaaaataagaaaattttctactttagtgtatctgtttaatcaactatcactatgaagcaatctgtgtcagcagttcaataattcgctttctttcaccgctaccctttgtagacaaccgtaagagaggaatattatatatttcaaaaatatgatctttttttgcatcacgcttactctgctccgtagtatcattgtggtaagtataaccatccgtttctacagcaagaacaggcaatttggtcacacgattgattatcagaaaatcaacatgtgtactataatgagaagcatataccttctcttcttcattcattagcgacatatcttttataatctgccttatgggaatatgacacaatacttttaagcaagaaaaagcagcatcagacgataacacttcatttatcaatgcatatgtcaaattctctgaagcatattctgatattcgagtattacttttaataaactccataagtttatctgtataattagaatacaaataatcaaatatagaagctatcttgctttctgtaactgtatagttattataattaatatattccaccaagtctgtcaggtttcctttttgtttctgttcatttcctgtcatcacaagtacaaatttattttttgcccgtgatactgcaacatttaacaaattgggatcatctgcaaacggagttatttgattatcaaccacactcataataataacatccttttcacgtccctgatatttatgaatagtagcggtctctatatcaggaagctgcctacgaaaagcatccacttgcctattatatggagtaacaataccaatactgtcaatacctgtcattccaggcaacacctcatttttaaccacatctatttcacgttgattccactgtccggcagcatgattacctttaaccgttttgattgcgctcaacacatcctgttcatctgcatcatttgtcataataagcaaattaccaccgtaaaacttctgattgcaaaaattaatgatacgtggatgacaacggtaatgctctcgcagcattgtctggcatacatcttttataaccacacagattgatttcagaaaactattcttagcacaatcataaccttcagctatatgatattgttccatcacagaactgagttttcttttatcatcttctgtaaccacattagctaattgcaacgtatcgccaacaataacagcatttttagcacatgacaaagccaatactcctgtctctatggagatctgcgaagactcatctacaatcaaataatcataaagcttctcagacatcaaacaagaacgtgcagaaaaagttgtactaagtacaatgggataagctttcataaaatcgcgacttcgcttcctcagctcttttgcatcacaaaatactctacgtttggtcttgccaaatgccctgttcagcccagatttaaacaacatcatagacttttctgccaattcaccggccaaaagttttgcatcataagccactaaatcattctcaatagattccaacctttcacttatttctctcagtcgattcttataataaagaatctgtaattccttaaccagatactccaaattatctttgtcaaaattactatgcaatccaaattctcgtttcagccaccacagacgtatgcgttcaataattttgcgcaaaaacgctccaaattttagaacctttttttccttccttgcttgataacgtagccattgagcaataataagcgaagaattaattcttttctgcacctgcaaatcatctttcatatcatgatccatacaaaaatgcttccactccatttcaacctcttgctgttcctgtcgtaatccggcctgctcattttgtaaagcataaactctatcgagactatcctgaagaacacgcaaatcctgctttaacttttgctcatcttccgcatcaattgcccaagaagcaatttccattggaactgtcggttgattctcgataaacaactctttattttccttacttcctaatgctgctacaataaaatcaagaccatatttttgcaatttttccagcacattcattgttgctgaattattattagacaccaccatcacggtcttaccatctctaacaacattagcaatgatattcagtattgtttgagttttaccggttccgggaggtccttgtatcacactgatttgattttcaaaagctgctgccacagcttgtttctgactcgcattgcacccaaaaggatatatcaaatcgccatgcttcattttttttacttcatacacggagggattcagataacatgcagcaacagatttatcatccacgaaatcaatcttttcataaatttgagccaaaatcccgctttcatccttatccttacccaaaggattaatagtagccacacttctcatgtattcaaatgtgtctttagccgttttaccatccagactatttctgacaacatcaatttgatcattcgtaaaatccgcaacgaatccattgcaatactttatgcgccaaaacaatctatctttatactcaaaacaccaaatatccccaatgcctttttgtaaaatgccatctaaatacacttttgtcattaaagggtcaaaccacttataatcatttaaccacaaaactttatctgcactatagctataagtcttattattattaaaacgcacactaaacagatttgaatttatcctagcgattgactcaatctgcaatgttttaggttcaccgtttaaaagaatatatgaacgtgacaggtcctgcatacttcctagcaattatggaatttttcaaagatatacgtcaaaaatacaaatctactattaaagattggcataaattaatacaattctttaccacaaatccataaagcaggtaatgacacccaaaattcagatgataacaggaaacttaaaagtcactatctttgcattagtttattaataacaaacacatgaaacgtatcatagtcatttcaaccagccttcgtgtcagatcgaatagcgacctacttgcagatgcctttattgaaggtgcaaagagtgccggacacgaggtagaaaaaattgatctgttaggtaaaaaaattgcattttgccgcggctgtttttgctgtgccaaattaggcaagtgtataatcgaagatgatgtaaacagcatcatggagaaagtcgtgcaggctgatgtcattgtttgggcaacccctatttattattacgaaatgtccggacagatgaagaccctgatagaccgtatgaatgccatgtatgcccaggattataaattccgtgaggtttatctgctgactgctgaagatgaatcttatgttccggaacgtgcagaagccggattgacagggtggattgactgttatcccaaagctagattggctggatctctgttttgcggaggagtaaatgaaccgcatgccattcaagggaatgcaaaactgcaagtggctttcgaaatgggaaaatcagtataatgaatatgatagacaaaatcagatttgataccatacaacaagtaaatgacttctatggggtgcctacgtttcatcccatggtcagtgtgctccatttggaacgcactgactcggaagctctttcaaaatatcaactacattatggggtatacgccatttggctgaaagaaaccaaagggtgtaacctctcctatggtcgtaccccatatgattttgatgagcaaaccgtgacctcttttgagcccggacagacagttacagtggaaatcaccaatcgcaatatacgcccccgctgcatcggactgctctttcatcccgactttttgaaccgcacccaattgggacgaaatatgcagcgatatgaatttttttcttatagcagtaccgaagctctccacctttccgggacagaagtctgtatttttaaacaggtacttgacatgatagaaatggaagtacaacatcctatcgacaatcatacccgtgaattaatcgtgtcaaacatagaattattgctcaactattgtctgcgtttctacgaccgtcagttcattacgcgggaagaaatcaatcataacgtagtgaaacaatttgatgcactactgaaaaactatatccgaaaactagccgaaaaagaaggacttcccactgtcagttattttgctgacaaatgctgcctgactcccggctacttcggacaactcgtcaaaactgaaaccggacgtacagccaaagattttataaacgacagacttttgatttccgctaaggaattcttgaacgatgaccaattgacagtgaaccaaattagcgcacgtctaggctttgagtatccgcaacattttgttcgttttttcaaacaacattcgggacagacacccaatgaatatcgcaaagcggtctaaggaatcttccataattcaggtaatttctccctaaacctagatataccttcttgctgtgattctctctaattttgtatcagtcaaaatcacaacactagaaagtatgaaattaaaaaactatctgaccttaatggtattactctatggtatagacatgatggctcagaacaaacaggaggttattatggaaaaagaacagttaacaatgacacaagaatgggacaagacatttctgcaaagtgacaaagtaaaccattgcaaagtaacttttgtaaacagattcggtattacgctagcggcagatatgtatatacccaaagatgtcgcaggtaaattgccagccattgccgtaagcgggccatatggtgctgtaaaagaacaatcaagcggattatatgcccaacatttagcggaacaaggctatctgacactcgcattcgacccgtcattcaccggtgaaagtggtggcgaacctcgctactcttcttctatggatattaacactgaagacttttgtgcagccattgattatctgtcatgctgcgaacaggtagataccgaccatatcggcattctcggaatctgcggctggggaggtatcgccctgaacgctgcagccctcgaccccagaattaaagcaactgtaagtgtgaccctttataatatgacgcgagttacacaacaaggatatttcgatagtatggacgaagaagcacggcataaattgaagcaagaactggcacaaatccgtacggaagaatttcgctctggtaaaatcaaaccgcaaggaggacttccggacaataccccagcaaatgcacccgattttctgaaacaatacatggcatactataaatctcccgaaagaggttatcaccctcgttcgctcaattctaatatgggatggaacatcacctctcaactaatgctcttgaaccataatctttgggttgctgccagtgaaatcaggacacctgtattaattgtacacggagaaaaggcacacagccgttattttggagaaagcgcattcaaaattattaccaacggcaaatatgctgccaacaaacaactgtttatcgtccccggagccactcattgtgatctctatgatggtggcgataagaattatattccctggacgcaaatcgttaaattctacaatcaagaactgaaacatgaatagattatttctgattatattatcaacttcatttacactgaacataatggcacaagaaaagataatacaaacagccggacgtgaccaattaggttcatttgctcccaagtttgcagaactcaatgatgatatactctttggagaagtgtggagccgcaacaatctgctcagtttacgggatcgcagtctggtaacaattacttcgctcatcagccaaggtattaccgatagctccttgacttatcatctgcaatcagccaaaaagaatggtattacccgtactgaaatagccgaaatcattacccatatcgcattttacgcaggatggcccaaagcctgggcagcattcaacctcgctaaaatcgtatgggcagccgacctagagggtgaagatgctaaaacaatctttcaacgtgaaatgatttttcccattggcgaaccgaatacagcatatgcccaatattttatcggaaacagttatcttgcccaaatatcagactcccaaattccatttgccaacgtgacatttgagccacgatgccgcaataattggcatattcacaaagctgcaaaaggtggaggccaaatgctaattggtgtagccggacgtggctggtatcaagaaaaaggaaaacctgcacaggaaattctaccgggaacagtaattcatattcctgcgaacgtaaagcactggcatggagcggctgccgacagctggtttgcccacctggctttcgagattcccggagaagatatttccaacgaatggctggaacccgtaacagacgaagcgtatgaccaacttcaaaaataaaaacgtatgaataaaatcttttatttatgggtagtcctcagtatggcaactaccacctttgcacaatccgcaaaaactatggacaagaaagaatcaaacccaaagattttggtcgcttatttttcagcgaccggaaccacagctcgcgctgcccggacagtggcaaatataagcggtggagaactgtatacaattactcctgaaaaaccgtatacggatgcagacctaaactggaataacaaaaagtcgcgcagttcggtcgaaatgaacaatccgaaagcacgtccgacattgggaggcaaaaaattagatatctccaactatgacgtgatttttatcggttatccaatctggtggaaccttgctccgagaatcataaacacatttatagaaagtcaggagtggaaagggaaaatcataattccctttgccacttctgggagcagctccataaccaacagcgtagcccaattaaaacagtcttatcctgatttcgactggaaagaaggcaagttactgaaccgggctgacgaaaatataatccatacttggattcaaaaaacaaccgagttgctgaaaaaatagcttcatataaagctatttctttcagtttttctgcgattgaaaacacaacaatcctgtgatttgctttcaaaaatgtatctttgtcgtattggaaacaacgaaaaaaatcaatataaggacatgaattttgttgtgatttgctttcaaaaatgtatctttgtcgtattggaaacaacctctattagtttgagcaataacttcaatagttgtgatttgctttcaaaaatgtatctttgtcgtattggaaacaacagttcccaggctgatttgaatcgtagtgcgttgtgatttgctttcaaaaatgtatctttgtcgtattggaaacaacaaaatacagacacttgcaaataattaagccgttgtgatttgctttcaaaaatgtatctttgtcgtattggaaacaacacacaaattgtattgtgctttagtgatttgttgtgatttgctttcaaaaatgtatctttgtcgtattggaaacaacttgcctcttgcatcaatcttcgctattagagttgtgatttgctttcaaaaatgtatctttgtcgtattggaaacaactgaattttgttagcgatgaaggggattatgttgtgatttgctttcaaaaatgtatctttgtcgtattggaaacaacaggtagcaatgaattaaaagaaagggacatgttgtgatttgctttcaaaaatgtatctttgtcgtattggaaacaacagattgtatatatacaaatcataatcaactagttataccaataagtagaatcaaaaaaacaagttgttttcaaacataaaaatccgcctttagggcggatttttatttcaaaacaattctaattgttgcccaggagaattaggctgaacaactttttttgaataaaaaatttctatattttcaaattgcttgtctgtaatgcataaaattccaacatgaccggtttctggaagcaaacgttttactctacgaatatgaacatcagcattttctctgctcgcacaatgcctaatatatatggaaaattgaaacatcgtaaaaccatctgctaataaagatttcctaaaatcagcagacattcttcgctcttttttagtttctgtcggtaaatcaaagaatactaaaatccacattactctatattcactaaaacgttccattaacccatatccggataaataattttacgtaattctccgctataacatttgtataatgacgctgttgtttgagcgactgctaccatcaaaggacttcgtttatttgcaataaacaaacagacatattaaagatgaaaataaaatccaaataagtacaagcaaataggctttatatcagacatttataaagaaatcgtttctttcagtttttttcgctattttctgttaattagttctttttgggtacatttttgttccttgtttgtttcttgatttcggttttaattcgtacatttgcatacgaaaaagaacgaatgaaagaatacgattatgccacgaataaagaagcctaaaaaagtaaaagagcccatccgtcttcggatgaaggatttgtccgatggcagcaaaagtctgtatctggatatataccgcaatggcaagcggacatatgagtacctgaagctgtatcttatcccgggaacggacaacaatacccgtcggcagaatgaaataacaatggccgctgcgaatgccatcaagtcgaaacgcattatcgaactgaccagcggcgaagccggtatcgtgaaccatacagataaggtttatctgctggactggatgcaaacctatttggagtaccaagagaaacgcgacaagaaaggcatcggtcaaatcaaggccgttacccatatcctgaaagaatatgcaggggaaaggtttttgttggatcgggttgacctcgctttttgccaaggctatatcgactacatgctgacgaccttccgccctaaaggaaagccgatagcagcatctacacgcaatacctattatcagatattcaacggtgccctgaacactgccgtccgggctaaacggttgttgagaaatccgtttaatgaaatggaaaaatcggagaagcccaaaatgccggagagcgtgcggtcctatatgaccatcgaagaggtacgggcgttgattgccactccggtacaggatgggagggttaaaaacgcctatctgttttcctgcttctgcggactgcgtatcagcgatattgtcggcctgaaatggaagaatgtctttgtcgataacggccaataccgtctggcggtggctatgcagaagaccaaagaaccgatttacctgccactctccaacgaggcgttgaagtggatgccggagcgtgaggacaaggcggcggatgaccatgtgttcagcttgccttcaaacatcaaccagtatctcaagccgtgggccgaagcggccggaatcaccaagcgttttacttttcacacggcccggcacacattcgcgaccatgatgctgacgctcggtgcggatctctataccgtatcgaagctgcttggtcatacctccgtgagaatgacacaggtgtacgccaaaatcatcaaccagaaaaaagacgaagcagtcaatttggtcaacgggctattcgactgatgtagttatacatgtcaaattcaatttacaggtaaatatttccggcttttctccgacttttcaaatagtcgaagtaatgccactattataataagtataaacccataaaaacaattcgacatgaaaggacaaaacaacaggtcctctctttttttgaagggagaccacatctgcaccacttcgctacggaacaggatgtagcggaagaattttacgaattgctctccgaagcgagggagctttatcttcaagacgtcatggcaggcggcaaacggtatggccgctatgtggatgactttataaacagtcaccggtacatcgactgcaacagtgcggtttgcaggaattgccatgaaatgaacatccatatcatcagagggctgttgatcgattgcacaagtctcgtcaaaagcctctttaccgcagaaacattttctttcgaggagtgcatggccttgaaacgaaagtacgacattgccggagtatggttcggctcttcacgtatagaagattccagaaacgatccacctctctccttcggttgtaatttttcccgtgaacagatgacaggtattgtggcttgcgccaacgcttatcatctgttttgcgtttccacactccgcatcgaggacatggaagcgctttttgcctgcaagaagggcttctgcatacgtgtgaacaatatccgccatgtggcggtcctgttcgacgcgttgctcgaaaacaccttcatcctgcctcactggcagtcggttctcgacaaggggcggttcctgttgtccaaagacggcacaagatacgttaccgcttcaagcctctcgtccgccctgtctgcggcgaggaacaacattacatcggcaaacctcggcatacgaaaagccgtcagccgactgaaaatatgacacgaagtgccaaaaagccaagtatgtgaaagataaaacagtgacagttgccgtgatacgtgcatagtatcacgccggtatttccggctgtccggttcacatcacataactttgacctccgttagcgcgctgcataacggaggtaactctccattgtctaattttaacatgtattttatgcaaaacagaacaacattcatggagcggttgagcgaacggctgaccgccatagaagcggttctcaagaagttggaaccggtggaaggtctgttggagcgtgtggctttgctggaaaataccatttacacgaccaagaaggtcttcacttttcaagaggcgtgcatgtatatcggcgtgtccgaaagtatgttgtacaaactcacatcgaacaaggaaatcccgcactacaagcctcgcggcaagatgctctactttgcgaaggaagagctggacgcgtggctcttgcaaaactacgaacctacggtggacgatgccatgcgtatggcgacggaagtgtccgcaacccaaccgttctttaaccagaagcgctatggaaaacgaaaaaagaactgaccgtaactcgtgggcggagctggacgagaaccgcctgtcggatatcctcactgcatcgcaaataaaggccacggacacctacgagactccgccccagattatatggattgacaactccaccatagcgacgctcggtaatttcagcgcttcgacgggtaaggcgaaggcgaaaaagacgttcaacgtctcggccatcgtcgccgcgtcgctggcgggccggcaggtcttgaactatcgggcgcacctgcccgaaggcaaacgcaggattctgtacgtggacactgaacagagccgtttccattgccacaacgtattggaacgcattctccgcctggcggggctgcccaccacgacggacaacgagaatctcgatttcatttgcctgcgggaatacactcctgccgtccgtatcggggttatcgactatgccctgcgtcagaacaaggggtatgggctggtcatcatagacggcatccgcgacctgatgctcgacatcaacagcaccagcgaatcggtggaggtcatcaacaagatgatggagtggtcgtcgaaatacgacctgcacatccattgtgtgctacacctgaacaagggcgacaacaatgtgcgcgggcatatcggtacggaaatgagcaataaggcggaaacggtgctggtcatcaccaaaagtgcggagaatcccgttatcagtgaagttcatgcgctgcatatccgcgagaaggagttcaaaccgttcgccttttccgttgatgacgaagggttgccggtcatggtggataactattcgtttgacggcagtgtaagaccgaaagcccggagcagcttcatggatttgtccatcgaacagcaccgggaggcactttccgccgctttcggggacaggcccatcaaaggtttcgagaacgtgctgcaggccctcatggcttcctatgaggctatcgggttcaaacggggacgcagcgtcatgataaaactgctgcaatacctgacggaaaacctgaagctgatcgtcaaacgggacaagctcttttattacgatgtgaccccgaccgaagccctgcttttcgacgaagaatgcgaggaagcggaaggtgaaaaataatttagtttactttggtccgggtatatataggagaaaaaccaaagtaaactgttttttgaaaacaagtgaaaagaaaatgacatgaccatagcggaagcaaaacaactgcgtatcgtggactatctcgccagtctcggctaccatccccagagtgtgatatcaaaacaatactggtatctgtcaccgctgcgcgatgaacgcactccgtcgttcaaggtcaacgaccggctcaacgaatggtatgactttggcgcagcgacgggcggcgaccttgtggaactgggcaaatacctgtaccggacgaacagcgtgagcgaagtgcttgcctgtatcgggagacatgaaaatgctgccccgatacaaagagtgcggattccggggacaacaccccgtcccgtcgaagctgacatgaaggacgtgctcgtcgtgccgttgcagcaccatgcgctactctcgtaccttcattcccgtggaatcgacggggacatcggccgcatgttctgccgggaggtccattatgaattacgtaaacggcgctacttcgctcttgccttcggcaacgcggcgggcgggtacgaggtgcgcaatccttattataagggctgtatccggtgtaaggacatctctgtcatcaggcaatctcatggtgaaacacagaaccgtgtttgcgtgttcgagggcttcatggattttctctcttacctgacgctgaaacaggcgggtgatgatacggtctgcatcgacgcaccttgtgattacctcgtgatgaactcggtgaacaacctgaaaaaagcattggaacacttgcaggtgtacgaggaaatccactgttatctcgacaatgatctcgcagggcagaaaacggaagagaccatcgccggcatgtatggcgggcgtgtacgcaacgaagcaccccgttatcgcgaatacaaggacctgaacgattacctacgcggaaagaaacggtaaggcatcatcgttaccctttcccttgaaagctctcctcccggagggctttttttatgcccgatttttctgcttcgatacctcaaagtatgaaattaaagttcaattttagtgtttcaaacttatttctatgtaataaaatactgtttgatataaagagtttttgttacatcaaatataatatttttctttgcaaccgtacttttaaagttcaattaaagtttaatttcatacttaaaaacagatgggttcatactttatattcgcccttgtactgacggtgctgtacatcgtctatttcgcggtcaatatcatccgtgacctgtatggaaagaagggaacggagaagactgacgaggaagttttcgacctcggtccgatggattccacggaagagagtgtcgaggtttcggagaacgagaccgggttcaaaatcggaaatgaaacatacggcacggagactgtacctgccgcttcgcctgccgcccaaaacggcgacaccgggaaaaaagatggaacagccaaggatcggctcgaacggctgaaagccaaggcagaggcacagatggaaaaggtcgcaccctacctgtccgacggctttaccgacgaagagatgtataaggcaatgatttccaaaggacgcttggacaaccgtcccagcctgaaatggagaccggtcaaagataagctgtaagatgtcgaaaacgaagaagatactatgtgcgctttgttccatcatcccctgttcggctctggcgaaaagcggcagcgtgaattacagttggggggcggatgcgctggcgacgatgcacgactacgtggtaacgatgatgttctacgtccaagctctctgttgtgccatcgccgggatttgtgtgattgtgtccggattccagatttacgtaaagatgaacacgggcgaggacggtattaccaagtccgtcgtaacgcttgtgggcgcgtgcctgttcctgatcggtgccttccttgtctttcctgcctttttcggctatcgcatatagaaacgggatgcaggaatgaggtgccgccataacgattcgaaagaactgcaatacttaccctaaaataaataatcatgtttcaaaaaacaaaaagacaaatgaaaagaatgttttctgctaaaaaggtacagatgctcacactgatgttgctgtgtggcacgacggccgtcatggcccaaaactccgcaggcgattactccgccggtacgaccgcactggcgaccgtgacggaggaaatcgccaagtacgtccccgtcatggtcaaactgtgttacgccattgccggtgtagtggctatcgtaggcgctatctcggtgtacatcgccatgaacaacgaggaacaggacgtgaagaaaaagattatgatgatcgttggcgcatgtattttcttaatcgctgccgcacaagcacttccgatgttcttcggtatcggcgcataaccctcccgcacgatgaaaggcaaggacgaacgctatcccgactacccgctgttcaagggcctgcaacggcctttggagttcatgggtattcagggacgctacatctactgggcggcgggcgttgccggcggagccatcgtcggatttatcatcgcctactgcctcgtgggtttcgtggccggactggtcgtgctggttgcggtcgtctcgacgggtattgcgcttatcatgctcaaacagcggaaagggctgcataccaagaaagacggtcgcggagtgtatatctacgcccactcgaagaaactgtgagaagaaaagaaaaaccatcacgggcaacgtgtggtcttgttgaatgttgaacgcgggctggccgcctgaaatccgggtggaccggccttttttattgtattttgaaatgaccttgtacatcattctactttttatcgccttgtgtgccggcatggccctgtcggtctatgcgttcggtaccggaggcaagcgtaagcgtatctttcaggacatctatttttctgtggaagatacgaacggcgtgggcgtgctgtacaccaagacgggcgaatattcagccatcctgaaaatagagaatcccgtgcagaaatactgtgcgaacatcgacagctactacgagttcacgcaccttttcaccgccctcgcgcagacgctcggcgaaggatatgccctgcacaaacaggacatcttcatccggaaacagttcgagaacgagacgggggacaaacacgagttcctctcatcggcctacttccgttacttcaaggggcgtaactatacggacagcgtgtgttacctgaccatcacgcaggaggcgaagaagagccgcctgttctcgttcgacaacaagaagtggcgcgactttctggtcaagatacgcaaagtgcatgaccagctgcacgatgccggggtacaggccaggttcctgaacaaagccgaagcgagcgaatacgtggaccgctatttcgccatgaacttcaaggagcggatcgtgtcgatgaccaacttcaaggcggacgacgaaacggtctcgatgggcgacaaacgctgcaaggtatatagccttgtcgatgtggactgtgccgcactgccctcactgatacggccttacaccaatatagaggtcaataacacggatatgcccgtggacctgctggctgccatcgacaacattccgaatgcggagacggtcgtctataaccagattgtcttcctgcccaaccagaaaagggaactggccctgctggacaaaaagaagaaccggcacgccagtattcccaatccgagcaaccagatggccgtggaggacatcaagcgggtgcaggaggtcatcgcgcgggaaagcaagcagctcgtgtacacccatttcaacctgatcgtcgccgtaccggccgatacggacctgcaaaaatgcacgaaccacttggagaatgctttcggacgtatgggtatccatatttccaaaagggcgtacaaccaactggaactgttcgtgaactcgtttccgggtaactgttacggcatgaacgaggactatgaccgcttcctgacgctgggtgacgcggcgatgtgtctgatgtataaggagcacatacagcacagcgaggagacaccgctgaaaatctactacacagaccgccaaggcgtgccggtggctatcgacatcacgggaaaggaggggaaaaacaagctgacggacaactcgaactttttctgtctcggtccttcgggcagcggcaagagcttccacatgaactctgtcgtgcgccagttgtacgagcaaggaacggacgtggtgatggtcgatacgggtaacagctacgagggactttgcgaatacctcggcggcaagtacatttcctataccgaggaaagaccgattacgatgaacccattccgcatcaatcgggcggaaatgaatgtggagaagacgggcttcctgaaaaacctcgtgctgctcatctggaaaggctcgcagggtacggtcacaaagacagaggaccgcctgatagaacaggtcatcacggagtattacgacacttatttcaatgggttcgacggcttcacacccctgcaacgggaggatttgcgtaaggggctgctcatcgacgaccgtaaccatgccgagaagcaggacgaggacgaaggagagcggaccgggcgtatcgagcgcatgatcgacgagatggaacgccgccgtaaggagttgaaagtggaagagctgtcgttcaactcgttctatgaattttccgtgcagcgcatccccgacatctgtgccgaaaaccatatttcgggcatcgacatatcgacgtaccgttacatgatgaaggacttctatcggggcggcaatcatgaaaagacgctgaacgagaacatggacagttcattgttcgatgagacgttcatcgtcttcgaaattgacagtataaaggatgatcctctcctgttccctcttgtcacactgattatcatggatgtattcttacagaagatgcgtatcaagaagaaccgcaaagtcctggtcatagaggaagcgtggaaggccattgccagcccgctcatggccgaatacatcaagtttatgtacaagacggcccgtaagttctgggcctcggtcggcgtggtgacgcaggagatacaggacatcatcggcagccctatcgtcaaggaagccatcatcaacaactccgacgtggtgatgctgcttgaccagagcaagttccgcgagcggttcgatgaaatcaaggctattctcggacttaccgacgtggactgcaaaaagatattcaccatcaaccggctggaaaacaaggaagggcgcagcttcttccgagaggtgttcatccgccgggggacgaccagcggcgtgtacggcgtggaagaaccaagagagtgttacatgacctacaccaccgagcgggcggagaaagaagccctgaaactctacaagcgggaattgcggtgcagccatcaggaagctatcgaggcgtactgtcgggattggaacgccagcggtatcggaaaatccctgccgttcgcccaaaaggtcaacgaggccgggcggatattgaaccttcatgtaaaacaataacaatcaaatcatcaattacagaaaatggaaaagatagacatcagccaaagcgtgaagacacttgagttcgggagcaaatatgaagcccgtatccaacggatattccgtgagttcgacatcaaaaccatccgggatttgtgccaatggcccggaaaggacttggtaagggtacgcgacatgggaagaaaaagcatcgaggaaatagaggatgttctggaaaggtacaatctccggttgggaatgcccggtaaggaactggacgaatacgccggtatcggaaattccgtgcaggacgaggaagaagaggcgaagtgggaacaacgcaggtacgagatagccaaggaggtattcatacaccaccgtctggtggcaaattccgccgtatatgaggccgacgaactgatacgtgcactaagaggcatgacgcgccgttgacgggggctgtttttaaccggggaggaatccatgatgaaacggctgtcacttatccttatgctcctgtcgctcgttgtcgtacagcacatccacgcgcagtattacagcgtgaactacgatgcgcgtaccgtggcggcaatggctaccgctttcggtacggaagccgtggcggaaagctattaccgggagcaggtcgatgacatactcaagcactacaatgcggcggaagtggccacggcggggatttttgcctccaagttcttggagcataaagccttttccgacctcggtatctggaacagcagtacggagaactactactaccgccgcatttaccgcatggtctcggagaagatcatacccaagatatgggtggtggcgaaactgatgctccgctcaccgcaaacggctatctactggggcagctacctgatgaaaatctgcgacgaaacgaaaagcctgtgtatgcagttcgagagtgtagtgacgaacagcacgttgggcttttcggacatcgtgtttctggaaatcaaccggaacatcgcccctctgttgaaactctcggagataggcgacatcgactggcagcacatgctggacgacatcgccagcgtgccgggcaatttcaccaaggagaacctgcaacacgacatcgacaacctctacaacatgggtgtcggtctcgcctcggcaggtatcgggaacattggtgacgccctgttgcaaaccagttcgttccatgagctgatgggcggcagggtcagcaaggtcatcgacctgtatgaccattacggtgcgctcttcgagcaggcggagcatgacctcggcggcctgctgattgacatggtgggcggtgaggacaacgtggcgggactgttcgatttcagcaactacgaccttacctcctggatgacggactatctggacgagacggcgggaaactactacacgcaacggtggtatatcgcccggcgtgagcaagggagtatcgccttgtgcgactactacccgccgacggacgataacagcatactgaacggcggcgaatggacgcgtttcgagacaaccgatcccgacttttatcccaatgcctcgcaacgggagcaggcgctcgccaattcggaacggtacgccggttggtcgagaagccgggtacagcagctcaacaaccagaatgacggctatacctatagtatcaactactggcagaacggctatatcatcagccggggcggcaaacagacgaagaaggcatacgcctacgaaatccatgtgaagaaaagctggaaccgggaagaggtcgtctatgaagaggtgttcgattcctactcgatggacctgaacacgttcaaagccgggcttaacgcccgactctcggagttcaacgacaacgaggaaggttatacctattatatagcttctgacgcgcggaactattatcaggcgacggacgccgcgaaattgcaaggctgcgagagcgtgaccatcagtgtaacctgttcggacggggctacgctcggtcagggcacgacgcagtacaagtgccgaacgtgcggcaaatccctgaacgcccattcaaaggagtgtgccatgcagaccacggttacggagaacgaactggacttgtccgagctggacgccatgctgcaggaggcagagaatcaggtagccgccatccagtcgcaaatcaacgcgttggagagcgagaatgccgacctgctgaaaaaaatcgccgaggcaagcgtggaagatgcggcggtgtaccggcagcagtacaacgcgaacaagacacagatagaccgcctgaaaagcgagctgtccgaatggcagaagaaacaacgggaatacaccgacgcgaaaaccgaggcgtcgggcgataacgatgtggcaacagacgactattaccgcataccggccatcatgcaggactgcaagacggcttacagcctgtcgtggcaggacggcggggcgtggaacggctacacctatgtccgtaaggcgaccatgccgaacatcaacggggtcatcacgttcaaggcgacggtctcgatagcccgcaaaccgaaatatttcctcggtatcaagatacaccgtgccatcgtgcagatcagttgggaactgaccacggaatacaccgacacgtatgtggccgacgtgctgacgctcgaccctaacctgtcggacgcggagaaaacgaaactggtgaacgaccgtattgcggagattgcacgagagcatccttcgtgcaagatcacgacggaatatgcccgtaccccaccattggaagagactccgaccggggaggtgtaccatctgctgtggtcaagcgaccggctcgaaatcgcacgggaagtggattcccggattacgatgatatatgccgacctcgtgtcactggagaagatgatgcactacaaacggagcatcatcgacgtgctgaaggacgtgctgcccgaattggatatggacgagggacgcaggctgacgctcgtggaggaatgccacgaacgctgggtggagaatgcgcggaacctgcggagcggaaacggcaggaacggcaaaggcagcggaaaggaggtgcggccatgaaacgtgccctgctgatggcagtcgtgctgctggctctcctgcccggcattgccaaggcgcaatggacgttcgacatcgtgtcggtagaagcctacatcaacgaccacaagaagcaacgcagcctgctgctggcccgcagtacgctggaatacagcaacaagctgctgcacgagtacagccgcaaagaggtcggcgagtacaaggaactgaatgtggacttggaccgctacacccgtgccttcgacgtcatcgacgtgatgtaccagtccttgcggacggtgctgaacgtgaaaagcacctatacggcggtcagcgaccgtatcggcgattacaagagactgctggaggacttcaacgatagaatcgtgaaacgggggcgcatcgaccccggcgatgccgtgatactggccatcaacgaaaaggcaatacgggacatcgccgatgacgggaaacagctttacaaatcggtcagtgacctcgtgctgtatgccacaggggcggcagaatgttcgacctccgacctgctgatggtgctggaagcggtgaacacgtcgctggacgacatcgagcggcacctgaaccgggcgtatatcgagacgtggcggtacatacaggtgcgcatcggttactggaaagcgaagatttaccgtcccaaggtcaaggagattatcgacggggctttcggacgatggcgcaaagcgggacggctggattattaacgaacgataaaagggaaagaaggcaaactatctacaggttagagtttgacttccatgccatcgacatcgggaaataaaaacagagaaagaatttttagtacaaacaagcctattgggattataccaagggataaaaagacattcagattgatgcaatggaaaagattgtttttgcaaaagacattacgttatataaggccgattgtcttgaagtgatgccttttcttccggaatcaagcattgatttggttttatgcgatcccccttttggaattacagcttcacagtgggataaaataataccattcccggaaatgtggaaagagatcaggagagtcaggaaagaaaatgcacctacggtcttatttggcagcgaaccgttcagcagctttctacgctgcggcaatttagatgaatttaaatatgactgggtttgggaaaagtcaaaagcaagcaattttcttctcgctaaaaaacaacctctaaaagcacatgagctaataagtgtctttggcaaaggcagaaccccttattatccaatcatggaggaaggcgagccttacgggaaccgcacgaagagaggaagcaattggacagggataaacaatgtacccaatcctacattcaggcatgaaaacaaagggacaagatatccacgaagtgtgatatacttcaaaacagcggaatcggaaggcaaaacgattcatgtcaaccaaaagccgattgcattattggagtatctgataaaaacatacacaaaggaaggagatactgtccttgattttgcttcggggagcatgagcaccgcaattgcctgtatctatacgaatagaaaatgtatttgcattgaaaaagacgagacatatttctcgcaaggagagaaacgagtcaggaatgaataccaatatttatgacagtaaaggaagctcaaaaaaagtatgactatacgatataaataactgtaaaataatgaataaccggaaattaatatgaacagaactctcttactcatggcggttgcagcagttgcaacgagcggtgtcaaggcgcagtcggttacttacaaccatgactcgccgaaacagaaccagattacggttatggaaaccggtacgggcgctctgtcgcccgaactttattacacgctgctgcacaacaagtacaagaagtcggcggcaagcaagaacaaactgtcgttccgcacgctggcgggtgtgaacctgtacaaccagacagacgaggcggaagccatcgactcggcactggtcaagcgggccgaaatcgaggcactgaatgtagccgaccggcagattgacctcgcgtggctggccgagggcgataagataaacgctcaaatggaacggcttcagcgcaacatcgaccgcatcccccttgccgggggcacaacggacgacagggagcggtggacggaatactaccacgtctaccagtgcgccattgacgctacgaaggacgcctacatgcccaacgcacaacggaagaaagagtacctgcgaatctacgaggacgtggtacggcagaacgagattctggtcggctaccttgcccgaagacagaacgccacggttgcgaacgggctgctgaatgcaaccgccgaccggagactggacaagggcggtatcgtccgcgaggcgatgggccggtggaacgaatcgcgttccgccgtgcgaggggcgcaatcgggcggcgaaactgatacgggagacggagacgagacggtaaacagaaagaactaaaaacacacaacgtatggcagacggaaatattctttcggatttcggtatcgacctcttggaagaggaaatcgacgacgtgatttttcagaccaacgagtttctgaccgatgcgacctttaccggctcgcaaggtcccttctggtggattcttcaaatgtgcatggcactggccgccctattcgccatcatcatggcggcaggcatggcgtacaaaatgatggtcaagcacgagcctttggacgtgatgaagctcttcagaccgctggccgtgtcgcttatcctctgctggtggtatcctccggcagacacgggcatggcaaacagcgggagcaactggtgctttttagatttcctctcctatatcccgaactgcgtcggttcgtacacacatgacctgtacgaggccgaagcctcgcaaatctcggacaagttcgaggaagtgcaggagttgatttacgtgcgcgacacgatgtacactgccctgcaggcacaggccgatgtcgcccatacgggtacgtcggacccaaaccttatcgaggcaacgatggaacagacaggtgtggacgaggtaacgaacatggagaaggatgcggcgaagctgtggttcacctcgctgacttcgggggtaatcgtggggattgacaaaatcatcatgctgatagcccttgtagtattcagaatcggttggtgggcgaccatctattgtcagcaaattcttttgggaatgctcaccattttcggacctatccaatgggcgttctcgctcctacccaagtgggaaggcgcatgggcgaagtggctcacaaggtatctgacggtgcatttctatggtgcgatgctctacttcgtgggcttctacgtgctgctgctgttcgacatcgtactttgcatacaggtagagaacctaacggcgataacggcaagcgagcagacgatggcggcttacctgcaaaactccttcttctcggcgggctatctgatggcggcaagcatcgtggccctaaaatgcctgaacctcgtccccgaccttgcggcatggatgataccggagggtgacacggcgttctcaacccgaaacttcggcgagggcgtggcacagcaggccaaaatgacggcgacgggcgcaatgggtacggtaatgagataacaaagtaacgataaatattcaaacaaaatggtcatcaagaatttagagaacaaaatcaaactggtcggaattatctgcaccgcctttctcgtggggtgcgtcatcatcagcgtgtcgagtatctggacggcccgcatgatggttacggacgctcaaaagaaggtgtatgtgctggacagcaacgtgcctatactggtacgccgcacgacgatggaggaaacgcttgacgtggaagccaagagccatgtcgagatgttccaccactacttctttacccttgctcccgacgacaagtacatccgctacacgatggagaaagcgatgtacttagtggacgaaacgggcttggcacagtacaatacgctcaaggagaaaggtttctattccaacatcttgggaacgagtgccgtcttttcgattttctgcgacagtatcaccttcaacaaggagaagatggagttcacttactacgggcggcagcgtatcgaacggcgcagcaatatcctgatgcgcgaactggttacggcgggacagctcaagcgtgtaccccggacggagaacaacccgcacgggctgctcattgtgaactggcgcacgctgctgaacaaggacatcgagcaaaagacaaaaagcaactattaactctaccagtcctatgaatatcaaaggattcagacgtatgctgttcggcgagaagatgccggacaagaacgacccgaaatacaaggagcgctacgaacgcgacgtggatgccgggcgacgcttcgccaaagcgacacgtatcgacaaggcagtggccaaagtacagggtttcgccaacgcccaccggacgctgtttctcgtcatcgtatttggcttcgccatctgcgggctgacatggaatatttaccgcctgacggtggtgtaccgccatcatccgacccgccggacggccacggagatgcaggattccgtgctccgggaacggcataagatgctttccgtaccgcatgtacgaagattcgatacgaaggaaagtggtacggaaaggccggaatagaacggcaggcttatgaatatgccgtttgagagaactataagcaagtatgtgcaactcaattaaagggaaacaatgaacaatatcttcaagagaattaatttcaggcagccaaagtatatgcttccggctatcctctatattccccttctcggcacgtcgtacttctttttcgacctgttccataccgagaaggtcgaggtacaggataagacactccagacgaccgagttcctgaatcccgaattgccggacgcccaaatcaagggtggcgacggtatcggcagcaagtatgagaacatggccaaatcatggggcaagatacaagattattccgctgtggacaacatcgagcgggacgaaccggacaataaccaagaggaatatgaatcgcagtacaccgaagaggacatcgccctgcttgaccggcaggaaaaggaaaatgatctggcagcggaagcggccgatgccaagaggcgggagcaggaagctctcgcagaactggaaaaagcactcgccgaagcgaggttgagaggacaacgggaggtcatgccgtccgaaacggacagcaccgcaacggcggctccgccggacacgatgacgcaggccaagggaaccatcgacgaggaaagccgttcggtcaaagctcctgcggagacggacaaggcaagcgaggtggtgaagaaggtaaagacggcttcggactacttcaacacactggcgaaagacgctcgggaaccgaaactcatcaaggcgatcatcgacgagaacatcaaggccgtggacggctcgcgtgtgcggctgcgcctgctggacgacatcgaaatcaacgagagcgtggtcaggcgtggtacttacctgtatgccacagtcagcggtttctcttccggacgtgtaaaaggaagcatcaacagcatattggtggaggacgaactggtcaaggtcagcttgtcaatctacgatacggacgggctggaaggactttacgtacccatcagccagttccgcgagacaagcaaggatgtggcgagcagtgccatgtcgggcagcatgaacatgaataccagcggatacggtaacagcctcgcccaatggggtatgcaggcggtgaacaatgcctaccagaaaacgagtaacgccatcagcaaggctatcaagaaaaacaaggtgaagctgaaatacgggacgtttgtgtatctggtgaacggacgggaaaacaggaactaaaagggcagtgacaatggaatcagacatatcaaaacttcataagggaacggacggcttctattacgaggactacatcgctcccgataagcccgaaacattcgttgggaagctcgtaagtaccgaatggtggcacaaaggggtacgattcgccctgatatgcaactttcaggcagaagacgggcggaggattgccttattcgccttccagaagcataccggtttttacgggccgagagacggtgcggtcaatttcaaacatgtggagaagaataccctctgggagtgtgaaatccggaaaacccggacggaacgctgtacctggatgagcgcccgacaaattgtagaactgaaaacagacgcaatatgatagagacggatcgcatttaccttatggactgcatggagggcatgaaacagatagcggatagtagcgtggacgccataatcgccgacctgccttacggggtgttaaatcgcagcaatccgtcggtgaactgggaccgccagataccgttcgcagccttgtgggagcaataccggcggattaccaagccggacagccccattatcctgttcggacaggggcttttctccgcatggctcatgctgtcgcaaccccggctatggcggtacaacctcgtgtggcagaaagatcgggtgacgggacatctcaatgccaaacgtatgccgctccggcagcacgaggatattctggtattctataaaaaacagccggtctatcatccgcagatgacaccgtgtcctccggaacggagaaatcacgggaggcgtaaaacggagggatttaccaaccgttgttacggaacgatgaaactctcaccggtacgcatagccgatgacaaatatccgacctcggtcatcttcatgccgaaggaacacaagaaaggcgcgttctaccacccgacacaaaagcccgtggcgttgatggagtacctgatacggacctacaccgacgaaggcgatgttgtactggacaactgtatcgggtcaggcacaaccgccgtggccgctatccgcacgggacgacactacatcggatttgaaatcgaacaggtgtactgcgagattgccgaacggcggattcaggaggaactggaatgcaggaacaaagcacaagaggaaaaagagataagggaagaaaaacaaaatcaataaatcaatgacatggacaaaaaaggaatcgtaacggcatttcttctggcggcaggactgctgggaacgccgaatgtacaggcacaacgaacctacgaggagatggaacaacttacggtaaatgaacaggtaacgacggtcatcacggcctcggaaccggtacgcttcgtggacatctccaccgataaggttgtcggtgaccagccgatagataacatcgtccgcctgaaaccgaaagagggcggacacgaggacggcgaggtgctggccatagtgaccatcgtaacggaacgctaccgcacgcagtatgcactgctctacaccacacgggtgcgggaggcggtaactgacaaggaaatccagttgcaggaacgaaacgcctaccacaacccggcggtctcgatgtccaccgtggagatgacacgcttcgcccggcgtatctggaactcgcccgcgaagatccgcaacgtcgccaccaaggcacaccgcatgaccatgcggttgaacaacatctacaccgtgggagagtatttcttcatcgacttctcaatagagaaccggacgaacatacgtttcgacattgacgagatacgggtgaagctggcggacaagaaactgaccaaagcgactaatgtgcaagtcatcgaactggtcccggaactggtgctggagacgggcaagacgttccggcacggctaccggaatgtggtcgtggtcaggaaaatgacgttcccgaacgacaaggtactgaccatcgagatgacggagaaacaaatcagcgggcgtgctatcagcctgaatatcgactatgaggacgtgctgtcggccgattcgttcagcacggcattgctggaggaggaatgacaatgagaaagacgattatcctgacgattgcctgcatgtgcctcgccgtcggcgcgaatgcacaacggggcagcggccgcctttcgctcggagcggggctgctgtacaagaacgagctggacgtgacgctggcctacgaacacgagatgaactaccgccatgcgtgggagttctttgccaacggctacctgcaatgggcagagtgcgaatcctgcaagcatgtatgcccgaaatctttctggcagaattaccgtacctacggcttcggcgtggcttacaaaccctgcgtcacgaggggacgcaaccattacggaagcctccgtatcggggcttcgggcggaagcgatacgaggaagttccttgtcgggctgcatttcggctacgagcacaactatgtgttgcgggcgggctggacgctatactggcaagtcaagggagacgtgatgataaagggggccgatgtgctgcgtacaggagttgccctcggtattaaactacctataaaataagggaaagatgaaacagaacactatcagaaaaacgtgccaggtagtgccggttctcctcataaccggggcattggctgcctgcgacgcacatatagaagaacccgacaagacggtacgtcccggacatgtcctctgcgtggacggcaaggccgtgccgtacagcgagtatgaaaattccgggaaacaggcgattgccgtcgtcttccatacctattcggacggggaaacggaaggaaacggctatgccgtctatctgtgggacatgacgccgaaggcttttgccgacagcctcggtgtcgagcagggtacgtcggcggacattgctgcatacgacgggaatgagaacacgttcgccctgtacgatacggaagaaacggcctcgccgatggctgaagccgtttttgccttgtggaaatacggacagagcgcctatatcccctcggtggcacagatgcgtctgctgtattcggcacagaccgtcatcaatccgattatcgagaaatgcggcggcgacccgctgccgaccgaggccgacgagtgctggtattggacatcgacggaggtggaaggacagcagacagtcaaagcatggctctactcgacagccagcggaaccatgcaggaaacgcccaagacacaggcgcataaagtgcgtcccattataaccatcaacaactgaatttatgattatgaacggaattaaagattttcaagcaccacagtatgtggatatagtacatccggacaaaggattcttcgggtatctgttaagatgcaaatgtcctaaacaagaggacgtttccggtaatttcatattcctcgacgatggaatagactgctacaagaggtttccctccgtaaagaatcgcagggaagaaatccgggcagaatggaacggccgtatcagccgttaccatgatattttccaaggtcagctctgctatgtcaatgaagaattgattgaagatttcattgatttcatgacttatggctctgacaatgccgtccggattttccttgagaagtttacagcggaagtacgggcttctgcaatatatgacgggcttaaacctctatatgcagtttcccatgtctgccagctttccgctgataaccgtatgcaatggcctcacatccacgtcctctggggtattaaaaagaattgacatagcaatggaagagagcaaggaattacagggattttaccggatattccgtgcggtggtgtatgtctccgtactgatggagtttttcgagtatgccatcgacccggccatgctggaccactggggcggcatactctgcgacattcacggacgtatcaaacggtgggccatctataacgacggcaacctcgtgtacagcaaggtcgccacggtgctgctgatctgcattacctgtatcggcaccagagccaagaaacatttggaattcaacgcccggcggcaggtcttgtacccgctcgtgagcggctttgccctgttagtgctgtccgtatggctgttcggtcatccgatggagacgcggttctacacgctgccgctgaacattattctctatatggcggtatcgctcacgggggttatcctcgtgcatgtcgcactggataacatctccaagttcctcaaagagggactgatgaaggatcgtttcaatttcgagaatgaaagtttcgagcaatgcgaggaactgatagagactccgtacagcgtgaatatccccatgcgatattactacaagggcaagttccgtaaaggctggaccaatataaccaactgttttcgtggaacatgggtagtcggaacaccggggtcgggcaagacattcagtatcatcgagccgtttatccgacagcactcggccaaggggttcgcgatggtggtctatgactacaagttcccgacgctggccacgaaactgtactaccactacaagaaaaaccagaagctcggaaagttgccccaaggctgccaattcaatatgattaacttcgtggacgtggagtacagccgccgggtaaatccaattcaggcaaaatacatcaacaacctcgctgcggcgagcgaaacggcggaaacgctgctggaatccctgcaaaaaggcaagaaagagggaggcggcggcagcgaccagtttttccagacttcggctgtgaacttcctcgccgcctgcatctactttttcgtgaactatgaacgcgagccttacgatgccaaaggaaacaaattgtacgctgaaaaacggcaggacccggagacgaaattctggaaaccgacgggtgtggtacgcgccaaagagggcggggaaatcgttgaacctgcctactggttaggcaagtattcggatatgccgcatatcctgtcgttcctgaacgagagttaccagaccatcttcgaggtactggagaccgacaacgaggttgccccgctgctcggtccgttccagaccgctttgaaaaatcgcgcgatggaacagttggaaggtatgatcggtacattgcgcgtctatacctctcgtctggcgaccaaagagagttactggatattccaccgtgacggtgatgacttcgacctgaaagtgagcgacccgaagaatccgagctacctgctgatagcgaacgatccggaaatggaaagcattatcggagcgttgaacgcccttatcctgaaccgcctcgttacccgtgtgaatacgggacagggcaaaaatgtccccgtgagcattatcgtggacgagctgccgacgctgtacttccacaagatagaccgcctgatcggcacggcacgaagcaacaaggtgagcgtgacgctcggcttccaagaactgccgcagctcgaagcggattacgggaaagtgggtatgcagaaaatcatcacgacggtgggtaacgtggtgagcggttcggcccgtgccaaggaaacgctggaatggttgtcgagcgacatcttcggcaaggtggtgcaaatcaagaagggtgtcacgatagaccgggacaagacttccatcaatctgaacgaaaatatggacagcctcgtacccgcctcgaaaatctcggatatgccgacgggctggatctgcggccagacggcacgggacttcatccaaacaaaaaccggcataggcggctcgatgaacgtgcaggaagcggaggagttcaagacctcgaagttcttctgcaagacggatttcgacatgaaggaaatcaagaaggaggaagcggcgtatgtaccgctgccgaagttctacacgttcaagtcgagagaggaacgggaacgcattctttaccggaattttgtgaatgtgggaatggaggtgaaagaaatgataaaggacgtgcagaacaaacgaggggcgaaataagaaacctgtttccgatatgagggaaagtaaaaaaaatgcctgcaatgattccgcgattattgcaggcgttttggcgtttccggtatcttggaaaatcctgtggagttggttttggtattcaatactacacaaaaagtatattataccgaaacaaaatcaactttcaagacctttggaacggaaaataatgctacctttgcagttgaaaaagaaaacaaatcatatactgtggatatagaacaaaaaagcaaaataaaccaactgctgctttccgccactcccaaaggattgttattctccgaatggctgaaaaggaacggttattccgaccagttgataaaaagataccgggaatccggctggcttgagatgctgtcaaagggagtcatgtaccgaacgggagacagcctgtcggcatacgccgcattgtcctgctacaacaggcaattgggcaagacgttccgtgtcgcagctcattctgcattggaactgttcggcttcaaccactatgtgcctatggggaaaccgttgctgatggtggcacacggcaaacagcgtgttccggaatggatacgccacgatgttttcgacagggtgataaaaccgttttccaccgataccttttcagaaccgcagaccgcaacgattgtgaaatacgaagtggatctgctggtttctacacctgaacaggcattcttggaatgtctgttgcttgcaccgcaacaatattcctatatggacttgttctatatgatggaacaactgacaacgctgcgtcccgaaatgctacagcaactgctcgaaacgaccaagaaccttaaagtaaagcgtatgttcctttatatggcagaaaaagcgggacactattggttcgaggcacttgatacatccaaaataggactgggaacctccaaattgcaactgtcaaaaaacgggatttatatctccaaatacaaaataaccgtacctaaagaactgaacgaatatgaatgacatctataaaaaacaggtggcattgttgatacgcattatgccgtccgtgtaccgcatcaaagattttgctgtgcatggaggtacggctatcaacctgtttcataaaaacatgcctcgctattcagtcgatatagacctcacctatattcccgtaaaggaaagggccgagagtctggacgcaatcaacaaccatctgcgaactttgaaaagctacatagaaaaatccataccgggcataaaagtgatccacaagcatgatgtctggaaattacaatgtactttggacggtgcgaccgtcaaaatcgaagtgaacgggacaaagcggggtatcatcggagagacagaggacaggaaactgtgcgaacgggctgaaacggagttcaatatgacctgtaaagcacgtacagtttcttattcgcagctttacgggggcaaaattgcagcggcattaagccgccaacacccacgggacctgttcgattgcaagtatatggaaatggcgtcgtttcatgatgtcaagaacggcttcatgctttgcctgttggggagcgacaagcctgtcatcgaatctttgcagccgaacgccatcgaccagacggaagcactggaaaagcagtttgagggaatgtccgatactccattcacttattcggattatgaagaggcaaggcataacctcattcagcaggtaaacgacagcctgaccgaaacagaccgggaatttcttctgtcatttgaaaacggcgaacccgattgggaaaaatgctgtgccggagatttaagccgctatccgtccgtaaaatggaaattacagaacattgccaagctgaaaaagagcaatcctcaaaagcacaaggcgggattggaaaagctacagaccttcttatttccgaagaagggataagtttttatgggcatcatgccggacagattggtgttaacggaaaaacaatatttggaatcatgtacaatatgcgagaaataaaagaggaagactttgaagcggtggcaaaatttgaaattgaaatttctgaaatctcattcggagaaaaggctattactgacctcgagttccactgcaagaaattagccaaagcaaaagaccgacgcggaatgatcgtgatagaagacacggaatccggtaaaattgtgggctgggtatggatggagaaaaagcagaacagcctgaccggagaggtttatgccaacttcaagtccatttatgcggatgagtgcattcgaggaatgcaaattgtagacgacctgtttgaaaaaagcatagaatatgcgagagagtgcaaggcggcttatattgtcggcaaggttcatgccgggaacgtaccgatgcgctctttgtataaaaagcattgcttcgagccaacccatgtaacgatggaaaggaaattgttatgataacgtccggcatacaaagttttgctctctcgcatggcgaacaatacaaacacggaagaacaagcctgcgtgacttgtcaggtaaactgcctttcgtggcaaacgggtgtaccatgctgttatgcgttgaaggccgggctgtcgtaaccaccaatacacgaaaacggacattccgcaaaggtgatttgcttgtgttgttttcggacaccttatttgcaccgctgtgtgtttctccttcattcacggcagaatatatatccttgtcattggaactgacaggggagattttctacaaaatgacttcccccgcattttgggacggactgtatgaatatccggtctgccgactttcggaagcacaatactcattggcagacggagtgttcaagcagatgatatgggcgatggagaacggtgatgaagaaagccggaaaaacatcctgcaaaattgcatttacaatgtttttctggctttagatattgtgttcaagccgatgtttcccgacttgggcaagtgttatcaaaaggatcagtcaagggtgctgttcggcaagttcatgtcactgctggctaagaatttccatgtaaaaagagatgtacgatattatgcggacaggctttgcatcacgaccgattacctttataagataacctgcaaaatagaacagcggactccgaaggaaatcattgacctgtttgtcgtaacggaactcaaacgctatttggacaacacagaacagtccgtcaaagacctggcccgtctgttccatttcgaagacgcgtcgtacctttgccgctttttccgccgcacggcaggctgttccgtttccgaataccgcaacaggcttggccgctcataggctccccgcatcaaatcgctgtattccactttcgcacatccgagccgctcctgcaaatagtcgaaagcagtccacggacggacattggtgccgcatgtgaacaaatcgacagcggcataaccacactccggccacgtgtgtatggtcaagtgggattcttggatgaccaccacaccgctcacacccactggggcgtatttgtgaaagttttcctgtactatggtcgctccggcacttactgccgcttcgtgcatgaatgtgcgaatctgttccacatcgtccagtttttccgggtcgcagttgtagaagtctgcaaggatgtgatgccctaagggaaggtattgctttttatccgtattcccgtttttgtgcagtctgtcgaaaaccgtagctccgcatacattgcagccttgttttttcaactccctgatggtctgatattccgcctctttccccacggcatagactttgccgcattgccggcagcggtaacggttttgccggagattgcggtctgcggtgtagatgtcatcgcgccctcgtttttcgagaggaaacaaggcgcgtgtacgttctgtcgtttccaggacaaagagctgtcctttgttgcccaaaagagatgcgcccatgtattcattgaaccgggtgaacatctctttgatggccagtccgtgcagttggaaacatttttgcagaaagtaaacctccgttgccgacttgttcccgaacgagaaaaagattctcaatccggactcttctttcagtacgctaatggcacgtgacaggaacaaggaagctccctcttgcgtataaggcggatcggtgaacaggcagtcgaaacgcccgcacaaatgcggaggcagaggcatcctcaaatccacccgttcacaacttatcggcagggcgaaccgtccggccagccgctccagacactcgatataacgaccgtccatctcaagtacatggatgtgtgtcgggcagatgcttggaccgggataaagttctttcagcagaaacccgatggcaaggctgacaaaatcatcatcgcccatgcatacgatttgtctgcctgtcaatgtgccgtttgccaagcagagcaaagccctgcggaatgctgtctgtacggtacattgggcttggtccagtgctacatccgctacggggcgttcgtcgaatgccgcacggtattttttactcagcgcgtcagcgtatgcgtcccttgcctgttcgctttccgccagtcggcgatacaggcagaggtcaatccccttgaatccaagagcttgttccacatactcctttccgttatgagtaagccctacgcctccgctgcattgttccaatatgcccagcctgataccttcgttctttatggcggtcacgataggtaccggcaagagtaatttttgagagagggctttgttggaaagtggcgcaaaacaatacagctcctgaaaataaagttcaataatccgtcggctatccttaattgatactgtcttaaatattttgtcgatataatccatttattacatatcgttgatttacaggctgcaaaaatagaacaacatcattaagtaatagagagcaaaatcctgctgatatgggtacttttcaatacaaaggcagataggttggatatatggccagacggctcaggacttcatccaaacaaaaaccggtataggcggctcaatgaacgtacaggaagcggaggagtttaagacctcgaagttcttctgcaaaacggatttcgacatgaaggaaatcaagaagggggaagcggcgtatgtaccgttactgaagttccacacgttcaagtcgagggaggaacaggaacgcattctttatcggaatttcgtgaatgtgggaatggaggtaaaagaaatgataaaggacgtgctgaacaaacgggaaactaaatagaaagccagattccgatatgagggaactaaaaaacgcctgcaatgattccgtgattattgcggacgtttcggcgtttcctatctattgtgaaaatcttatagttcaaaatcagcttcttgcggccctacataaaagaagggaaatcaggtgttttttatataacgggtacatttaccagtccccctttttttgtataatacctgcatcttccgttttggagataaactcccgaacctgtttttcggacagtatatctgcgaatatttccttgaggacagcccggttgatacaaccatttttacggaaacaacaataaaatcctttcagtcttttaccgcagtttcgacgggagtttatgaaaataaagtcgtatctttgcactctctatcaaacagataaatccatgtgaacaaagggttgaacggacatatcgccatgctttcgacacaaattatttgtggtttgaatgtacctgtcggtaaatcgctcctggcagagtggatgacaccgattgggcttgcctcctctcgtgttttattcgccacgctgatattttggacgatcgggcttgttttcaggagagaaaaggtcaatgccaaagacttgatggtgattgctttgggcggtatttccggtgttgcttgtacttatctttcctttgcgtggggacttaattatacgacaccagttcacttcgcacttattgtcgccttaaatccaatcgtagttatgctcttttccgtattgtttttaaaagaagctatcaaccggcggaagttgacaggtgttctgttgggaattgcaggagcatgggtcttgatttcacaaatggatattgccgcatccgttgaaaatcatatacttggcattgttttcgccatcgtcaatacagttatgctcggattttatctgattatcatccgaagagtggcgataaaatactctcctgtcacacttcaaaaatggatgttcctatttgcagcattgtccatgctgccgttcagtataaatgaattgtacgtgcaaccgctttatcagtccgcgttctgttggcaaccattactccagcttgtattcgtattgttgctggcaactgttctcaacaatctgctatatcccgtcgctctcaaggggatacagcccaccactgccagcatttacatcaacctacagcctattatagcttctgtcgttgccattttaatcgggcaggacatttttagctgggatgaaccggtttcggccatacttgtcatatccggtgttttactggtcagtcattcacaaaataaaaaataaagctaatttgcggttctgtattcattgggcgtacacccggccattttcttgaaccaacggctgaagtgttgcggatatggaaatccaagttcataggatatttcacttatggacttcgccgtattgaatacccgctctttagcgacatcgagcattttctgctggatgtgtttcagggcaggcattcccgtttcttttttcatcaggtcactgaaataattcggggaaagacaaagtttgtatgcacaatattgcacagtcggcatccctccatgccttgcaggggcatcagaggcgaaatactcatccagaaggtcctcgaaacgcgctaacaggtcgtgattggcattgtcgcgggtgatgaactgacggtcgtagaagcggatgcaataatcaagcagcagcttgatgttatccacgatgagcgaacggctgtgcttgtcgataggatactgcagctcaatgcgaattttttccatacattctataaccgtccgtctttcttgtttggaaaggtgcagggcttcgttggcattgtaagaaaaatatgaataatctttcattatatgcgccaatggtgtacctcgcagaaattcgggatgaaatgcaacaacccatccttcgggctggtgcagctgcccgtcatcttcagatcccattacctgaccgggggcgaggaaaagcatcgtcccctgctgataatcgtatatactttttccatatttaagatttccacagttcgcatctttcaatagaatagcatagatgttatacagttttttcccgaaccggagaggcttccctttactgccttcaataacgctgaccaacgggtgcagggtctccacgccaaaatagtcgttgtactgctggactgtatcaaccttcattatttcactcataatttcctcttttttaagtcattgcaaatatagctatttttctgtgatagcttttcattctgcttttaattaaaagcaaagatacggattcccgatggtacggcatataccgaaatcatcgttttggataccaattttactggtataccggcatcgttcttaccggcccgttgaaattggtaattctatccgtgaaattgatacacaggctcttaattcccctatctaattttgcaatcagaaagataatcaaacagataacgacatgaaaaaagaacagattcaagagaacggcatcagtcgtcgcgggttcctgaaacgaaccgcattggcaggcgcggccatctgcatcgcgccggcattggagaaagtaacggccgcggaaaaagccattacaggtaaatcgtcagtatcggcagcaaccattccagcaggaatggcagcagtccgcgcacagcgtaccttgagcagcggcaaggcagcctttaccatttcggcgatgggcttcggctgcatggggctgaaccatcaccgcagccagtctcccgatgaaaagacctgcatccggttgattcacgaagcgatagaacggggtgtaaccttattcgatacggctgaaagctatggctaccacaagaatgaaaaactggtaggcgaagccctgaaaggctataccgaccgcgtgttcgtctcttccaaattcgggcacaagttcgtgaacggcgtgcaggtgaagaccgaagaggacagcaccccgacaaacatccggcgcgtatgcgagaactccctgcgcaatctcggcgtggagacgctcggcatattctaccagcatcgcgtcgaccctgcgacgcccatcgaggtcgtagccgaaacatgcggcgagcttatccgggagggaaagatactgcactggggcatgtgcgaggtcaatgctgaaaccatccgccgggcgcacaaggtatgtccggttacggccatacagagcgagtatcacttcatgcaccgcgcggtggaagaaaacggcgtgctggcgctttgcgaggaactgggtatcggtttcgtgccgtacagcccgctgaaccgtggtttcctcggcggcatgataaacgagtacacccggttcgacaccgccaacgacaaccgccagacgcttccgcgtttccagcccgaagccatccgtgccaacacgcgtatcgtggaggtactgaacgctttcggacggacgagaggcattaccacggcgcaggtggcattggcatggctgctgaacaggaggccttttatcgttcctattcccggcacgaccaagctctcgcacctcgaagagaacctgcgggcctgcgacatagtgttcacgtcggaagaagtgaccgagctggaaaaggccgtggccgcaattccggtcgtgggaagccgctatgacgctttgcaggaatcgaaaatccagaaataggaagggcgtatgagaaaggttgtcttttatatgatggccgccgccttgctgtcgggttgcaacgcacgcaacgggaatatcatgcaaatcgaggaacagggcagtttcgccgtgggcggcacggtgctcaccgattcactggggcgcacctatcacggcgaccacgcctacgtgttctatcagaaacccgtcgatgcccggaaatacccgcttgtcttcgcccacggcgtggggcagttttccaagacatgggaaactacgccggacggccgcgaggggttccagaatattttcctgcgccgcggtttccagacttatctcgtcgaccagccccgccggggaaacgcggggcggagcacgacacccgcgaccgttacccccgtcttcgacgaggagacgtggttcaaccgtttccgcgtgggcatctggcccgattatttcgagggcgtgcagttcagccgcgacaaggaggctctgaaccagtatttccgtcagatgacgccaactctcggccctcccgatctggatgtctacgccaaggcgtatgccgcactgttcgacaggataggtccggctgtcttcgtcacccattcgcagggcggaggtgtcggatggcttacactgccgcagacaaggaacatccgtgccatcgtcgcctacgagccgggaacaaacgtgccttttcccgaagggcagatgccggaggaagggaaagtactaaccctgtcgaagaagaccgaaggcgtggaagtgccgatggaagaatttctgcagttcacgaaaatccctatcatcatctactatggcgacaatctgccggaaaccgacgaacggccggaactgtacgaatggacacgacgcctgcatctgatgcgcaaatgggctgccttgctcaacgaacacggcggcgatgtcacggtcattcatctgccggagataggtttgaagggcaacacccattttcccttctccgatttgaacaacgtggaggtggccgatcacctgtcgagatggttacatgagaaaggactggattgagaaggcggagtcatggacgaaggaactttctgaaaatggcgggaatagccggcggaacgatgactgaaaacgactattgagttaatcgaacaacctttaacaattttcatatgataccattatttatcggaggcatcggtatgcaggaagtgctgctgattgcattagtcgtcctgctgttcttcggaggacgcaaaattcccgaactgatgaaaggcatcggcaaaggtgtccgttcattcaaggaaggtatgaacggcatggagaaagaaatcagtcccgaaaataccgacaagaaagaggagtgacatggcaaaggaagacaaaacggacggcttgaacttttgggagcacttggacgtgctgcggacggcgattgttaaaatcgtcgccgtggccgtcgtgttcggtatcgccgccttttgttttaaggaaaaactttttgccgttatccttgccccgaaaaacgacggcttcatcacgtaccgtcttttcaaccggattgcagcatgggccggcggcgagaccgggagttttgccgtgcagctcatcaacacgggactggccgggcagttcgtcatccacatgaagacggcattatgcgcgggtgtcctgtgcgcgtcgccctatatcctttaccagttgttccggttcgtgtcgcctgccctgtatgcctgcgagcggaaatatgccgtgcggatagtcggaggcggctatgcaatgttcctgatgggtgtggcggtcagctactttcttattttcccgctgacattccgtttccttggaacctatcaggtcagcggtgaagtggagaacatgatcgtcttgcaatcctacatttcgaccctcgtgctgatgtgcctgacaatgggtatcgtgttcgagattccgattttatcatggctgtttgccaaattggggtttctcaccgccgatttcatgcgacgttaccggaagcacgctatagtgattatccttatcgttgcggctgtcatcacgccgacttcggacgtgttcacgttgtcattggtcacattgccgatgtgggttttatatgaagcgagcattctggtcgtaaatagagctgcaagtaaaaaggcagtagacagataaagaaacgacatcttgaagtgaaaaacaatctgccggccaaaagataaaacaaacctttttacaataagaggtaaggtactgtaacacgtaggtaatccgttttataaacggcaggtttttattcgtttctgcattatacatagaaaagccgtaccctgctcgttttccgaaaggcacggctttcatcccctaaaaagaggaatcagacagtgacaacagttacatataaattctgtcgctcctgttcgcagaatttatcgtactcggctttgtccgtgccgctctcgatagcccggtcgataacgtctcccaactcgtcgaaacaaacctcttcgttcacacattccacctccattcctttcacaagatagacctcgtaataatccgatccgttgagtgcgacgatgacgtaccctgcgtgcagccgtccgttcaccttaatgcggagtgccggcaaatccctgtatagggtggcggcaaactctttgataccccacgacatgaggacggtcatgggggttaacgctactaactgttccttaatggtctgtgcgacctgcattacatattctttttccataattctaagtttataaattattattccatgatttactcgaaccaatcggggttatcctttttgagttcggctatcaactcgttttcgggaagctgaagcgttctctcgtcggtaaagaagaaaatctcgtcataaatcctttcggcttctttactggcaaaaccttcgttctcgtcattgaaactgccgggctgcaaggcatcgagcaggattgtcgaaccgataagcaattcttcgccatcgacagattccacgatgcgggagtaataagacctgccgttgaattgaatcttagttgttttcatatcgtcgtttttatattaatggtacattttttccgtgttcattgaggtattccatgatatgcttcgcttcctcgtgcgatgcccggttccggtcatcgtaacggcgtgtttcgtccgccatgaccttgatacacgccttaatcaggcggtacaggctttgctgaagcgtcgggtgcatgtccgggattgccgccgcgaaccgttcggggttgaaactgaaactgtttaccgccatttcccagtctttggcgaggcggtattctttgctttctttaatgtccatattcttgaattttaatagttctcgttgcatattctgtcaagttcctcaattatgggtgtcacctttttgcctgtaagactttctatgtcatacagcaagtgctccaagcgttcatacgccttttctcccgcttttgtaaattctccggtactgtcgaatgcgctaccttcgcagcccagttcttgcaataattcttctaatgtcttcatttgttaaattttaataattgtttttctttccctctgttcggcttccttgttgccggagccgcttcgggttttatggtgctttccggggctggcgaaaaagccctttccgacgttttttcttgccaattacgcttcgcagaaggaagaatttgcaagaaatgcacttcaaaacgacggaatcaggcgcgacagcccatatttgcaccgataaaaaccggtgcggtgacggacgggaaagccagacgggagagaatacggagacctgaaagcggtagaaaaggacggctggaagctaaaaaagagaatttatatatctatatatggataattgttgttatatttgcatataaatagtgatatattgacattatggaaacaacgaactataccacaaacagcgatatgctgacgcttttggcgaagcgggtcaaggagtaccgtctggccgcccgcatgagccagaaggagctggccgaacagtcgggtgtaagccagacgactatcagccatttcgagcagggggtcagccgtaacctgaccttggccaatttcatctccctgctgcgtgcgctcggtcaggcagagcggctcgcggagattctgccggaacttcccatgccgccgatggcgcttcgggaaatcgagaaactgatacctaaacgagttaggaggggcaagaaatgatagaaagtctcgatgtaatcctatgggataaaaaggtcggcacgcttgtcgccaatcgggaaggacaccgcagcaaagcctgtttctacttcgacagcgattatgtccgcgacggctacgacatcgccccgctccgtgcgccggtaaaaggggttgccgcacagcgcggcctgccggtctatcccgatgaagagcggcttttcggcggcctgccctcgttcatagccgattcgctgcccgaccattggggaaacaccgtgttcaacgaatgggccaaagtgcatcatatccgtatgagggacttgtccgccctcgaccgtctcgcctatatcggacggcgcggcatgggggcattggagttcgtcccgcccactgccgaggaactggagacaccgttcaaggtggagatcgctgacctctaccaactggcccggcaggctttcgaggaagccggacggttcaacgtcccggtatcgggcaacctgatggtcgaaagcctgttcaaggtaggaacgtccgcaggaggacgacggcccaaagcggtggtcaacgtcaatttcggggaaggacaatgttactccggacaggtggcgaccccttatccgggctacacgccgatgatcgtcaagttcgacgaacaccagaagatgccgacgacacggatagaatacagttattacctgatggccgtagacgccgggcttcagatgatgccgagccgcctgttggaaggtgagcagacagcgcacttcctgaccgagcgtttcgaccgccggaacggcaagaaggtgcatatccagacattggctgccatgaacccctcggcagattcttacgaagcactattcgaggcggcctgccgtatcggcgtgccgccgggggaactccggcaactgtttcgcttgatggtgctgaacgtgctgggcgggaacgtcgatgaccataacaagaatttcagcttcctgatgggcgatgacgggcgttggcacgttgctccggcctacgactacacgttctcggtcgatccggacgcaccgtattacgtcaaccgccacagcatgactatcaacaaccggacagagggtattactgcggcagacctgctggaagtagcccgccggtacggtataaaggccgcagagccgttcatagaaaagaccataggcatcgtttcgcgttacccggaatacggccgggaggccggtgtcggagaggaatggataggaacgatagaaaaggaaatcgctgcacgagtggagtgcgtgcgagccgattaaaatagagcatgggatttcatgcaggggaaatgaacccacccgtttttgtggcgggtgggtttgtcgttgtcattccgcccctttcttgcttaggagggtcaactggtcgggacggtcgggaaaccaataggcgtcgctgtcaagatatacgcatctgtcaccattccaaggcttcctgaaagctaatacctcttgagggccgaatactactccataatcgtttgtaaatgctaccatgtcgcctacggccaaatcgtcctccgtttccatgacttcggaaaggcgattataaaactccatgccttcggcttcacgttccgctttccagcgcaaaaaatcctctttatgacttctgcccgtgtttatcggcgataattccgaaggcaaaacctccgcttccgaagtaccggacgaaatcagaataatgctgtcgtcttccatgttttccggtgcagaaatcactcggtaagccccatcggacaaaccgttgtccgggtcatgccaataaagcagattccctgtcttgataaaatcgtattttcccattgtcttgtgaattattgattatttatttcccttttttcgatccttttcctttggaaccgcttcggggttttactgatgcagtacacggtcgtcggcacagcttcatacgacggctcttcttgccaattacgcttcgcttgggaaggaagaatttgcaagaagtgcacttcaagccggagaatcaagcgcgacgaccgactttcgcatcggataaaacccgtgcggtgagggacgggaaagccggacgggagaaacaggcggctcgtgccgctacaaaagggaaagaatgcaattataagaggaaacgggcggtggcggggtatccgggaggctgactataaaaggacgaaggcgggcgataaagacaaaggagatagcgcactgactgtgttatcagtacgccatcttgtacattcaatcttcggaacccgacactttcatttttgggaacaatccttttcaaaagcattcttctccgaatggctcgatgttcgctttttggaaaatttgcgggttatgctgataaagaagcggcaggttcaacatagccatagggtattccacgaagccgctcctgcgtttgtagccggaatcggtcgccaatctgttttctaccaaaaagtccaacgcatccgggtaattgttcacgtcgataaaggtacggtccggcaaaccgagcgcatccatttcctccaaattgacggaaagtacgatatattcgtcttcatcttccaccattaccaagataagagccaaccagccattgcgataaaaccgtggtacgaggtaataccgttcgcctctgaactcgtattctttctgtctgaaagagctgtccggctctacgatttcaaattcatcttcacctgcggtaaaagcaatcatagggttgctggcatctacatacgcttcacctgctttgtagcacaaatactctctgttttcggaacgcacgatagcaaattgaatttccataaaatcttaacattaatcagttgaacaatctgtttattttttccctcctttcggaagccttcaggcttctcctgtcgggatttgatttttacgtgcattaaagattgcctttcagggagaaacaggcaaggaatttgggcagaattttatagttgcggtattgagcgtccgcgaaatatggacgattgaaaatcgggaaagctgctgaaaaattgtgttcaaatagcgtagcggtacttgaatgttcctccaaggcaatacctttgcaccggaaaaagcatgtcccgacgggcagagccgttggcgaagggatttccgtacaaaaggaaaacgaagggataaaaagggagatctgccaacggcagtgctaaaaaagacagccgctcctgcggctctctctctgtagcgttgcgctatttcttcccggtcttgctatccggttcgtcttgccgttttttcggggtgaacagtccattgaaacagaccgtcgtggcaaaagtacgtgcctgcgtggcattgcacaatcccgctccgggcattgtcgcaccgttgtaatgtttgcagtccttacatttcatcattacctcttttgattggttagacagtaggacggatttctccgtcctactattgaattatggtcaagctgcgacctcttcgggttgcgtatgttcttcgggttgtacctctgccgtgggttgtgtattttctgcctcggcggcttcttcgggctttgtctgccgttcctttgccaacaaggcggctttgcgttcctcgatacgtttatggcgtttctcatacacctcattatatccactttcaatttcggcgagcgtgtcgggcatgtgcttacgggcaaaatcgagcaagagggtcgcagcagcgttattgccgtatgcgcctttgaagttgtctatcaagaaatccctgcggataacggctttctgcttggccgtgaggttggcgatgatgttcattttttcttcgtcctcaaggtgttggtaggcttttttctccccgataccgaataccccgaagtgttccctgcggagagacgacagcaggaagaaatatatcatcttttcctcgtcctgcgtgaatttgctttcagacgtatcaacgtccaaaatctgtttcttagcgtctgcaacggttttctcgacggctatttccttgttacgtttgtcctgctgttccaatttttccaccggggaaagttgtttttcggtagccatgtccgcattggcggcagcacttgccatgtaacacagcgtaatttctttctgcccgatgcagatataaaacgtgagttcgcccgtatcgattcgttcatgaattgacttgcatttttccatatagttgctgaaatcctgctcgtactccttgtatgccgcctcgtattcctcggtagtgtcgtattcttccttttcgggtgctaccggcgtttcggggtatgccgtggcataggtattgaggtgctcgacctcgtaccccatagcggtaaggcgttccaccgcaagcatgttattgttgaaatcttggtagcccaatgatacggaggggtattgttccacaaactgcaaggctttctccacgagataggaagcgttcatttcggccagacaactccgattggcgcaatttccgcaaccaccctcgcagaacaacatcatgttgttggtattgtgggggcatgaggcgcatagggtcttgtcgaatgcgtaacggctaaggtctgtcgtgaaatcccgttcgataaactttgccacatcggcggctttcagtcctcgccaacagtcgtacaacatgctgtcgctgtctttcaagtgtttatagtacacctctttctgaatgtccgtaccgtatcggcaaatctcactcgctacactgattgtgatttcgtccttttccagaagttcggcgatttcgggtatcaatgatacgaatttcagacgggtacggatatagttctcgtttttgccgaactgcacggccaatgactgcacatcgtagcgaccgctttccatgagcttttggtaggcgttggcttcctctatgggggtaacgtccttgcgttgcaggttctccgtcacggccatttcggcggcggtctcgtccgaaacatgcaagatgacagccggaatttcggtcagttctgccataagggcggcacgatacctgcgctctccgaaaataatctcgaagcggtcggtgtccacaatggggcgcacgccgataggttgcaatactccctgctgacgaatactctcggccagttcggcaaggctcgcctcgtcaaagtgcttgcgtgggttatagttgctcggttgaatattcatcaatgcaactgatacgatgttgttctctactactgattgaatgttcgctgtttccataattcataaattttaatttgttattacattagattgtttgattactattgtctttattgtgcggtgtcatactcgtatatttccggattgtcgtacccgtcgaacactatccgaaacgtgtcaaagtcctttctgcccgccagtctgacggtatctcttttcccgatgaaatagggttcattcattgtccgaaacggtgcgccgagcgttatcctatccaccaacgtacaaactttgccgggttgttcgggcatgatataacccagtgcgtactcgttgtaaactaccaatttgattttatccatatcgctgtcaattttacgttgtttttttctttccctcctttcggttcctttctctgcctgaaccgctttgaggttttacggatgcggtacacggctgtcggtacagcttcatacgacggcttttcctgccaattactctttcgcagaaaggaagaatttgcaggaaatacacttcaagccgccgtatcaagcgcgacagcggacctttgcatctgataaaacacaacggtgacggcagagaatgaagccgggaaagcggtaagggaatcggtagaaaagggatatgcccgtcagggttagaatagggataaaacgggccatgtgcctgtacttgcgggcaggtaaaaaagagaaagatggtaagactataaaggaggaatgcgccctatggaaacagcgggcggataaaaaaggacgcatggctgccgtctccggggtgggcagacgcggtagccatgcctgtgtttattgttcgttcttctccagatactctttcattgcctcgttcacgatgtctttcagcgacatgttcttcttgatggcgaggaatttcatacgggtatgaatgcttttgttgatgacgaagttgcaatgaaccgccgtttctttttccgtgggggctgctaccggctgttttccgccggtagtctttttcgtaggtgacagcaacccgtccagtccgcctttcatgctgtctttcagtaaatcgctcttgctcatatcgggattattttaatttcagtacctcttttatgtcgctgtcctttttttgccggatagagtctctgtcatggaattgctgaaaagaggcgttgtccgtatttcggacacaacattcctgcgcagccgccacaccggccgccggaacatgcagcgccccggaattgcataccaaggccagcagcaccaacgatagaacagcaacgaatcctttcataccttaattttgccttgcaaaggtaagcataaaggcatttttttaccattcccgtgaaatgattaacaaaaataaacggaatcatctgtgttttccacccgcaggacttaatgcgggggcctctctggattcggccagtgccgccacgcactcttcgcgtatggacttgatgtaatccagtaccattaacggatcgacactttttccatcgagcttgcaggaaatatgcaggtgttcgccggtgctgcgtcctgtagaaccggtaataccgacgacatccctcggcccgatagcagcccctttccgggtaaggatacgcgacaggtggcaatagctgaccgtgtagtctccatgccgtaaggtcacatacttgccggaggatttgtcctgcccgactttcactaccactcccgccatcatggccatcacctcgtcgccccgtgcgtggaggtcgattccgttgtgaaacttcttttttccggtaaaaggatctttccgatacccataaagcgagttgattttcatccggtgcagcggatagcttacgctaaggtaacgctctatccatacgtgtttgcaggtgtcggcgggcaatgccggggcggcgtctcctgccgacggtaaggagtcttggacggaaagcatgtttccgggcaaggtcgccacattatccctaccggcagaaacgacttcaaccctgtatcgggacggcacggtcgagaccgtattgaattgtgcttgaacggggcctgcgatacttgcagcacccgccatcaaaaccagtagtttctttctcatgcggcaaatataaccagccctgcccaagatgtcccgtttccacggcctttttcgaccaaagtacaacaaaaaaagcattcagagtatgaatttatgcgcaaaatcatactctgaacataaaaataaactctcttaatacactaatattattctattatatacaagggaatgaaaagaatctatctttgcaaagtgtaattcaaaatacaaaattaaatatgaatgtagtacgatttgaactaattgaattgccctatccgacactggcccgattcgggcttacacaggagatgatcgaggacttgccgatgcgtgtcctcgatgagatttgcgacggcagacactctcccgtgcttccggtccgtgtccgtgacgagaagggagaactaatcgaaagccgcagccgcttcgcccttgtccgtagagatgacggtctgtcggacgtggtattttatcccgtcctggaatcctcgccactggaacgctacgacgaggcgcaacagaaacaactgctcgcaggcaaggcgattcttgccgatgtggagacggcagacggacggcacagcaaggcattcgtgcagatagacgaggaaacgaagcaggtgatgtatatccccacgccgattatcgggcgcaacctgcaagtgctggccgacataatgcacctcggtacaatggaggtaaacagtatgcagaacggcgaaccgctgacactggtcgtggacgatgaacccgtcacggtgggcatcgacctgcatgacaagaccggcatccgcttctgttcgggcgacagccagaaatggaaagaacagcccaaacgcgagtgggacaagtacactttcggcgtgtacggctgctgggtgatggacgatgacggcaacctcgactatgttcccgaagaggaatataccgaagaactgtggaacgaacagaagaaaagcgccgagcgtaaccgtgcggcgggagttcacaaataatatcttaacatccagcgaatatggcagaacaccaatattattccgaagaggtacttatcgagaagatggagcgcggcgaatacggctggctcgactatgtgaatcatttctcgcccgaatggcaggaggaatatgcccgctattgcaaggagcacagccttatggcgggcaacgaatccgccgccgagttcgtccactacaaggacgagcaactggaggcggcgatggagaacggagatgcataacggaaaccctttttaacaacggattatggcgatacgaaagaataccaacccccgaatgatggacctgcaacccgaaatgcaggacatattgaggcgtaacggtatgcaggcccacgtggtcagcgacggcacgggctaccggctcgtggtgcagggccacgattcgccgctgctgacctacgaccttaccgagcgtcagatgttggccctgacggactggggaacaaactcggccaacaagaaagcctacaacgtgttcacgagcattgtagggaaagacttttatatgcccaagaacttcgtccatgcccgcaatgccaacggccgtgtcgctatggggctgcacggctaccgtatcggtatcggcgaatacgggcatgtgggacggttgggtatgccgcccccgtttctcggctggacgccacgccaccagtggggcttccatctgcggcgggtcggcggccaactgttctatccgggaccgcccattgtccctgaacggtgggacggacgcatgaagccgggcgaattgcagtcgggcggctacggcttctattacaaatacaaggccggacaaccggtgcaaccggcacaacaggccgacgtcctgcaaaacctgcagacggtcatcacgccgctggtcagccgtccgcgcagcacggaaccggcccgtacctacaaggaactgataagctctcctgtctatttttccaacgagaaatggcaggaatgtcttgcctcccacggccttatcgtcgataaggaggcacggacactgaccgtacagtccgaaaaggtgaccgccgatctggtctatgacctgacggaagaagaaacggccgtcctgacctccaactccatcgaggaacaaccggtcgagaagcggctggaagtcctgaacggggttatcggggcggattttgccgacaaggtaacgatggcggacctcgacagcaaacaacgtatcgcccttggtctgcaccccgaagtacaggaggaactgacgcagcgtcagcaacaggagcaggaaatcctctccccactggaaaaccagctccggcaggagatgccgtatggtgcggctgcttccgtcgatggacgggatatttccgtccttgacgagcgcaagggctggtaccgagaagaacggcacggcagggaggtcgaggtcggcgagatagccgtacacccgtcccccatagagggcaagtacaagatgacggccgtcatcgacgggcaggtcatcagccacgagatcagccagaaggattacgacaaattccttgcggtcgatgactaccaccgcatgaaaatcttttcgaaaatattcagcgaggtggacatgaagatgcggccggaagcacagcgcagtctcggcgtgaagattttcgccgcccttgcggcaggaacggtcgtcacggcgggtgtcgtccacggcctgcggcatcatcatcacggtccggagttctacggtgagcgtttcggaggcgagccgcgtccgtatttcaagcccggtgtcgatacgccgagggacgtggctatacgcaatttcgaggcacagatgaatcaggatattaacgatatgagaagagggagataaagacaattatgagagaaggagaccttacctacgacgacttcctgcaaaggctgaacattcaggacgtgctgattgacgcgggctaccacctgaaccggcgcgacggcctgcgctatccctcgtatgtccgtctggacagcgagggacggcgtatccgtggcgacaagttcatcgtgacgcaacagggaaagtgctgcttccaagcacagcagcagaaagtctataacatcatctcgttcatcaaggcgcacccgcagtttttcgctgaataccgtgcgggcatgtctcccgaccgactggtgaacctcgtgtgcaaccggctgctgaaccatcccatcgaggaccggacaacgcggattatacagcccaagcgggacatccgcccgttcgacatcgcgaactacgacctgtacaagttcaacccgcaggaccgggagacacagaagaagttctatccttatttcaagagccggggtatcgacctctacacccagtacgccttccaccgccacttctgtctggcgacgaaacaccgtgaggacggtgcggcatacaccaatctcgcttttccgctgaccttgcccaaaggcgacggcacggtcgtgggcttcgaggaacggggacgtgcaagaatggacggaagcggcagctacaaaggcaaggccgagggcagcaattcgagcgaggggctgtggattgccagccctgcccaaaccccacttgcggaagctaagcgtatctattggttcgagagtgcctacgacgcgatggcttattaccagcttaaccagaaatgggacaaggaactgcgaaagggagtgttcgtttctaccggcggggcaccgagccaacagcagttcaaagccatgataaaggccactccacgcgcttaccaccatctctgcttcgaccaggaccgtgccggacagatcttcgccatcaacttcgcgctcacccaggcgggcaagacattcaccagcaacgtgacgaaagacgacaaactgctggtccgtatcagtggcgaggagaaccagaactacgaaataaaactcgaacccttcgactttcacaggataatcggcacgcttttacgtcccaaagaaatctatcgggaagatggtacgctcgactatcggacaatcggcgacggatatttgcaggagatgagcatggtgtgccaagacgagtacgagatagcccttgccgagggttcggccagtgaggaaacactggagggcatgagacaaaatatcatggccatagaggatgcgatccgtaatcttcccgctcccggcgaggacagcaccgaccttattgtgtacgagcccgctgaaaaaggctataaggactggaacgaacagctcttggcaaagatcaggctgcaagaatcagttcacgaagagccggccagaagagaagaacccgaacaggaacggcaagcacgtttccaccgatgacaacgcagtaccccctacatgaaacaacaaaagaaaagagaagacaatgaatgacaagaaattgacacataatgattttttgcaaagactcgatatccgggatgtactgcttgatgccgggtatcgccagaaccgacgcttcggactacgcctctcctcgtttatccgcacggacagtgaggaaaagcgtatccggggtgacaagttcgtcataacgcaacagggaaaatgctgttgccaaccaccccggcagaaggaatacaacgtcgtttcgttcatcaaggagcacccggcgttattcgcggaatattatgagggaatagacctgaaccggctggtaaacctcgtgtgcagccgcctgctgaacatccccttcgaagaatacgaggtgcaaaccgtaccggtcaagcaagacctacgaccattcgatataacagactacgacctgcacagattcaaccctcaagaccatgagatgcaggagatattctatccctatttcaagaaccggggtatcgacctcagcacgcagaatgctttccaccgtcatttctgcctggcaacaaaacacggcgcagacggtgcggcatacacctgtctcgcttttccactgaccttgcccaaagagggcggtacggtcgtgggtttcgaggaacgggaacgtatgagaatggacggatgcgatagctataaaggcaagagcgaggaaagcaatgagagcgaagggttgtggattgcaagtcctgccggaacacctcttgccgaggccaaacatatctactggttcgggagtacctatgacgcgatggcctattaccaactccatcaggcgaagaacaaggatttgagaaaggcggtctttatctcaacgggcggcaagcctatcgggaaacagatgagagagatacttgatcttaccatccctgcccggcaacatatctgtttcgataatacccggaaagggtcgaatctcacatgggatttgcaaaaggagatatgccgctcagtacgttttgccatagaggaaacgccggagaggaaaccctatctcgattccataccggacggcggggatttgacagacggagaattttacctattgcccaagggtggtttgcaagaaatctgcatacggttcgacgccgaatcggaagaagcggagtcgatgcgttcgagcgggttgtgtgccccggaagacgtgcaggaccagatagataccacgaacaagtgctaccgggaatatcgagagaaactacgggagttccttggtattgacagggagcatgatgtctccattacctgggaaagtccggattatcgccatacgagctggaacgaacagcttttggctgaacagaaacgtgaagagactgtcgggcaggagtcggaaaaagaagaaaacgccgggcaggaacgacagatacactttcgccgatgaccatgccatataccatacaagatgtccggaacattatcctgcgcccgcacgccgggcaattcgtcatcgacgaactgccattgatattcatgtgcatggcgggactggtgtacggcggcatggaaggtatgccgcttggcggtatggcgacggtcattgccttgtttctgttcctcgtgctgctgtatcgtttcatttgcctgcgccggatatgttaccgggtcggcaacgaacagcttgtctgcgagcggggacttttctgccgcagggtggactacatggaactgtaccgtatcgtggactttcaggaacaccagagcctcctgcaacagctttgcggtctgaaaacggtcgttatcctttcgacggaccggaacagcccgaagctcgaccttatcggtatccggcgcggaaacgacatcgtggcgattatccgtgaacgtgtggaaatcaataaacgaaaaaagggaatctatgagattacgaatcattagcatatgggtggtctttgtgcttgccggtctgcttccgcaattggccaaggcgcaggttgccgcttcgaacccgttggaatgggcagccttggccgagggaaacgaactgataaacggccagatagacaaacaaatcaaggggcagacacagaccgccctgatgcagaacagtatcgcagcggagttcaaccgcatacatgagtgggaaaagcagtacaacagttacctcaagacggcgaacggttatgcttcgtcgctgaaagcctgtacccacctctataacgacggcgtgcggattttcctcacgctgggaaaactgggcaaagccatcggggacaacccgcagggcatcgtcgccagcatgaacatgaacaacctctatatcgagacggcgacggagctggtttccgtgttcacgttgctgaacgacgccgtggccaaaggcggcacggaaaacatgctcacgggggcggaacggagcaaaaccctgtgggctttgaacgaccagctcgcggcattcagccggaaactgcatctgctctatttgagcctgcgctattataccctgaacgacgtgtggaacaacataacggcgggtatgatagaccgcagcaacggcgaggtggcccgtctggccatgtcccgctggcgcagggcggcagccatcgcccgttgaaaaaaggataataaaaaacgaagaacgatgaagcggataatctcgatatggattctgttgctgtgcgccggtatctcgaaggtacaggcgcagaacgatgcgacccttgcgggaatgattctggtttataccaacaaggccgagaaggaactgaaaaaccaagagaaggtcatgctgatgcaaactacagggcatgtgtggacgaaggaagaagtggaaggcacgacggacttgcaacgggagttcaacaattacctgaactcgttccgctcgattgtctgctatgcggctcagatttacggtttttaccatgaaatatcgcagcttacagacaacatgggcgacttcaccaaacaattgagcagacattcgacgggtgcattggccgtcgccctctccacgcggcgcaaccagatttaccgggagatgatattgaacagcgtggaaatcgtgaacgatatacgcacggcctgcctctcggacaacaagatgacggaaagggaacgtatggagatcgtgttcggcatacgtccgaaactccggtcgatgaaccggacgctgcagcgactgaccaaggcagtgaaatacaccacgatgggcgacatctggcgggaaatcgacgagggcgcacgccctgtcgcggacaagtacgacatcgtgaaagccgcccaaagacgctggcggcaaattggaagaaatgtaagaccctaaaaaaaagaataaaaatatgggagcttgggatacgatattgaaatacggcggaaaggccatgaaaggcatgggcaaggccgccaatgcgacggggaaaagtgccggtcatgcggtactgcatccctcgcagacccttcggggagccgggcaggcggtcaaaacggctaccgccggagctgccgtcggttatgtgggttgggaaaaactgaccaccgacaaaagtgtcgcacggatcgtcagtgaggccgtagtcggcaaatccgccacggatgcccttgcaggtacgaccgaagacatgaaggaactgaaagacaaagccggagagacggtctctgccataggtgaggctgtgggaggcgcggactcgaaactgaacggggtatcgaacttcctgcgggaagcctccggcggtgggttgttcaacatgctcagcggctttttgcgaaacctcggagggggcaatgtgtcgggattgaacattgcaggacttatcgcagcagcgtacctcgtgttcggacgtttcggctggctgggtaaaatcgccggtctgtttctgggcatgatgcttatcggcaacaatgcgggcgttgtccgcacggttccctcggaaacggtatcgaggacacagacgccgacactctctccggaggaacaaacgcaaagcggaggaatgagaagatagaaacacgaaaatatatatcacaatgaaatatacggaagaaatgattctgcactccgacagcggctattgtatgccgttcgaggagccgcaggggaaagatgtggagatgtcgctcggctacggcgaacaggtacacccggcaacgggagaaaagttctttcatcacggaatagacttcaacgtgaggtgttacatgctgtcagccgtggccagcggcatcgtgtcaggtgtgggcaacgacccggtacatggcatttgccagacggtccgttacggcgggtacgaggtgacatacggtcatctgtcgaatgtattcgcccaattcggacagcgggtgaaagccggacaaacggtggctttgagcggcgaactgctgcatatagaagtcaaattcaagggcgaggaactgaacccaatagagttcctgaccatgttgtacggcaacatcaaggctttgcaggaagccgacggcaatggtgcggcgtctttttacgatgcggaaacaagagtaaaaaacgactacgagaaggatcaaagggaaatagaagagctgatgctccgctttctgccactttacatggaggatttacagcggggagcgtacacggtgcccgcacatacggagcagtcgctgcgccacatctttacaatgggagctgcgaaggagtatttctatgagaagatgccgagcatgtacaacccgctgggactggggcgcaaagccatgccgctggcctgcaaggtacagaacctgctgatagcggatttcctgaactaccttgccctgcggcatgatgtgtacctttccgcaacaggcggcgaggtaaaaaaaaacttcatgacgaagccgtagcgggcagcggactcattgatccgttggcggaactggacatcgacatccagagcttcgacataccgagaatcgtctccgtctatcccgaccgtgccggagtccgctggtggacgaaggcatggttcaacaaccgggaggaaggggaagcctcggtagaaatcgagcgggaacaggcgatacgtttcattcacgacaatatcgaaaaggacacgtggctcgaagagtttttccccaagcaaatggaggtgtaccataacgctatcgagcagacgaaggaacaactgttgaaacaaataaacatgatatagaaagacattgattatatggacggaatcaaacatagcagaaggtttgcggagttggaggccctgatgagcagttatttccgccatcatcttgtccccgtcatgacgcagacgcaatcctacctgaccgaaaaacagggcgaggaaatgaaagcgtattcgacctccctgggcggcatactcggcatgatggcgtcagcggggcaaccgctcgccgacccgtaccagactctcaaggttacgggagagtggaactccaagacgaccgaggactacatcgggatgtgcaaggacaggattctctcgtcggaggagatgcagcacgacctcgcctacatggccggacagtggcgcgatgtcgttgtgaaggaagtcggacgcgagcgttacgataaactgtcgcaggaattgggctgcgacctcgcctatgccttcgtggactatcgtgtagagcaactgatgatagaccaactggtcaaggaacgtatgcccaaatcctcggcggactacatcatccgtaaggcggcagaatcgagcctgctgggattgccacaggctttggggcgctcgccgctggccgaagagatagaaaaacgcggagaggttgcctaccggccgagcaagttggagaaaggtgcgggctgggtgttgggggcttcggccgatacggtcatgttgggcggtacgggttcgtggacggccgttgcacggttcatcggtgcggatacggcaatctcagccgttgccgaccatttcgggaaggaggaaacgcagccgctctctgcagaggagtgtatcagcaagggcgtgttcggcagcgacagcaacgtgttcgacagcttccgcaaagaggcggcaagcataccgggcaaagaaaacacggctcttgccgcagccaacggaaagttgcaaaagaagataccgattgtaacattcgattttatggactggtggaaaacagacaatagaaatatgccgtggcgggaagaaaccgccgaggaggaacggaaacgggtggaacggtataaagacgtgccgatggttgtcgctcccggacaagaggaagcctacctgcaagatatggaaagacggaaagccgaaacggaggaacagacggaatcgaaacccaaacaaagggaaaaagaggaaaaggaagtgtcgacttccgccgtctctgcgggggaagggatgcggcaggaacaggcaggtcagggaacacagaccatacagaccaacgagaacggctgggacgagctggtccgctcgctcggactggacggcataggcgatgtcgcgggtaatctgggctatatactggccatgctgcccgacatcctgctgggcgtgtttacaggtaggacacaatcgctgggcctgaaagacaacctgctgccgatagcgagtatagtggcaggtatgttcgtcaagaatccgatgttgaagatgctgcttatcggcttgggtggcgcgaacctgctgaacaaggcgggacacgaggtgctgggaaaagaacggacggagggaaacagaaatgcagccacgaccggtagagaggtacagtacagacgctatcccgacgagccgctgaatccgcgtatcgtgaacccggcactacaaggctgcacgctggttgccacgatagaccgtgtgccctgtacggtgcagctcacccccgctatggccgacgcttaccgtgcaggagccttgccgctgaacacgctggccaatgccgtgctcgcccaaagcgacaagctccgccagatggcttcgcagaactatgacaacggacagcaggaaaccatcgtgcggacacggggcattcaataatcctgtaaccgataaaaatatgggaatatgaaagaaaaatcgcaaatagaaaagaatgccgaggagcgtcagatagagctgctctccacggctttgaacgaagcgtcgaatgccgggggacactggctcaacgctacgggcaagggctttccgaaattttatccgaaaggtgttgccgtcagcccgttcaacggcctgttcatggccttgcattcggaccggaacgggtgcaagaccaacctgttcaccctttacagcgatgccaaggcacgcggcacatcggtacgcgagcacgagcaaggcgttccgttcctgttctacaactggaacaagtacgtccaccgcaacaatccggaggacatcatcagccgggacgcttatctgaaactggacgaggaggtgcagaaacagtacaagggcatacataacagggagatccgcacacttttcaacatcgaccagacgacactgccctacgtggataaggagacttacgatgcggtattgcagaaagacggtagtgccgtggagcgtggctactccgaaaccgatgaacggagactgcatatccgcttcaacgacttcctgctgaaaatgcgggacaatctcgtgcccgtgcgttcggacggcagcggaatgccccattacgagacggaccgcgatgcggtctatatgccgcgccaacggaacttcgagcattataacgactacgttcaggaagccttgcggcaaatcgtgagcgccacggggcaccaacaacggctggcccgtgaaggcatggtgatgaaaaacggcatgggtccttcggaagatgccctcaaacaggaacggctgatcgtggaggtggcttcgggcatcaaaatgctggaactgggactgcctgcccgtctgtccgacaaaagccttgaattggtagactactggaaccgggaacttaaagagaaccccaacctgatggatgccctcgaaagcgacgtgaacaacgccctcgaagtaatccacaaggcggaacggggcgagaaaatcgaatatgccacgatgcgtaaccgccggcagacttcggatatgcaggagcagttacccaagcatttctacgtggccgatgaaatccggaaacacccgaacaaggaggacaagaccattgtcatcgtcatcgatccgtcctcgaaatcggcggatgtgatactccctgccggtgcgtcgccggaggtggacaacgaagtgccgggcatgaacaaggcccgtatcggcagggctttgcgaagggaaggtattgaaaacgtgcgtttcttcaatcccgacggcgcatgggggtacaggcccgatgatgcctatttcgccaagaaacaggtatcactggcccgactgaagaactgggcactggagatgctttccacactggacgtgacgcctgcggtcaaacgggcggacgaaatcggtttcgaccagatacagatgatccaggacgacaagaaccgctgggcgctgtatctgaagcccgaacatcagaacgggtacagtatctatccagacaaggaggacgtgaaccgttttttctccacgctcaaacaggcgatggacaacatcgacaaggtacgcatggaactggcgcacaagtattatgtactggcggaaacacagccagacctgaaagtggacctgttcagcagcggggcgcaggacatcgacctgaaccggattcagcgtgtgtccgtattcaagaccaaacaagaaggaactctgtgcgtggcgaccatcgacgggaagaaactgcagccccggagcgtcacgcggcaacagtggcagcgcatgtggctggccgaggaccgtgcagaatataaacgccatctggcggccacgctttttgccgatgtgctgcgtaaaggacagacgcaggaagagactgccggaaagaaacaaggagaagaggataccctacagcaggataaggacaagcaccccaagcaagccaatgaggaatcccccaaaactgcttcatccttgaaagagttgcccataaaagatataccggaacaactgtatgacaaatacaagaaaatcaaagaggaacaaccggaagcggtcgtccttttcaaacatgagaacaagtattacgcttccatgtatgatgcggagaccatagcgaacgagctggacatgcctccggccaaagaacgcattccgtatgatgcggacaaaatcatattggtatttgaacacagcaatgaggaaacaaggcagcaaatccatgcgctgcgggcatacgtgatggattgtgacggtatgtccaaggcgcagcaaaacgagcctgcagaggcaactgacgaacagaacgagaacgaacaacgtccaaccatgaggaggtaaagatatggcaaacaagaatcaagaatatacggaacaatacgcagattatgcgatggcacagatgcggaggtacggcattccggcctccgtgacgctggcacagggcatactggaaagttccaacgggcagagccgtttggccgtgaatgagaacaaccatttcggcatcaaggccacgcccgaatggattgccgaaggtggccggtacggtctgtattccgatgacaagccgaacgagaagttttgcagctacgacagcgtgggcgattcgtatgagcaccactcacgcttcctgaaagagaacagccgctatgcccgctgtttctcgctctcgcccgatgactacaagggctggacacagggcctcgaaaaggcgggctatgccacgggcgggcattatgccgacagcctgcaacgtatcatcgaacagaacgggctgcaaaagtacgaccggcaggtcatgcaggaaatggagacgcagggaaagcggttcggcgtggaagagaacccgctccgtgaggtcggaaatacagtggactattcgtttccggtggagcggaaagagtttcttttcgtcacctcgccattcggtatgcggcaagatccggcagacggcaaggaacgtatgcacacgggtatcgacatccggtgcgacggcgatacggtcctggccacggaaaaagacggcaaggtcgtcgctgtcaaagacaaaggccatgcacccggtaacaaatcgctgaccgtggaatacacccgtccggacggcagcaaggtacagtgtacctacatgcacctcggcgaagtttccgtaaaggcaggcgatacggtacaggcaggccagaagctcggccgttccggtaacacggggacacggacgaccggggagcacctgcacttcggtgtccggcagatttatgcggacggcacgcagcgggacgtcgatccggcagcgtatctggctgaaatcgcacaaaagggccacatcaaacagcaggtactacataacggcaacgacctgctcgcccgatataagggaacagaagagaatgccaccggcaaaagcctttcgcccgatgcgtggatgaaaaaactgctctcctcggaggatagcggcgtgggattgtcggggtgcagtgatcctgtcgtggaaatggccatgaccgcctttacctccctgatgttactggcgacgcaaatcgacagcaagaacaaggaggaacaaaaggcagccatttccgaggcgatggacagccggcgtatcgacctcaaagcgttgctgccgggcatgaaaacctgtgacctcacagtcggggaaaacgggcgagctgtcctgcaggcggacaacggcagcgttcaggtatcacgggaactggcctctgccgagttaagccgcctgtcggtgacgctgaacgacagttctctttcggaggaagccaaacggctgcgtgtgaccggcgtgctgaacacggtcatcctctcggaggcggcgtcgcagaactttgaacggggaatgtccgaacaacgggcacaatcggaaaacctgaaaagataatcccaaaaagtcatgataaaacgcgtgatgatacgactttgcgggtacttgtccggggtgtccgtctgcgccctgcatatcctgttctgttcccggctattcggttgggtagcaacactcgttatcgtgggcgtccaactgggtattgccggctggattgtctacatgagaatacgtgctcccgattaggaaacgctttcaacctgttcaacttcaagacaccccgctttgtccggtggactatgtatcactaaaagacaaaataaaatgattaaatgcaatattacggcgtgcggcaccatcggccgcgacgcttcgatgcgcacgaccaaagaagagaaaacattcctgacctttccgctccgcgtcgtgctccaaggcaaggacggtcggaacgaaacggtcgagatcagtgtcagcaaggagggcggtcagaagaaggtatccggctatcgaaacggattgcgtgtcgaggttgcggggacgctgttcctgaaacgccggggcgaaaagctctatttcaacctctttgccgaccgtatcggcccggcggcggacatcgcggattccatcaagggcgaactgtcgttccggggcaaggtgggcaagaacatcgaggaacggaaggacaaaaaggataagtcctacacgatgttctctgcattcagcaccgaaaaggtcgatgagaatttcgagtaccaatgggtgcgtttcttctgcttcgacaggcaacgtgaagagtggctgcaaccgggcgtcaaggtagaagccaagggcgaaatgacggtctcggtacataacgggaagccggacatctcctgccgggtggaagaactggcgcaatatattcccgaatcggataacttcaatcagtagcagtcatggccggttatagaaagcgaaatacggaggggccgagcagcgaggacaaggcgctggacctctttgccgagatgatgatcgagaaaatcgaaagcatccacaaggactggcataagccgtggtttaccgagggggcactgcaatggccgcgtaacctttccgggcgggagtacaacggtatgaacgcccttatgttactgttgcattgtgagaatgaggggtacaagattccgcgcttctgcacctttgactgcgtgcagcggctcaacaagcccggcaaggacgggcaggaattaccccgtgtatctgtactgcgcggcgagaaatcgtttcccgtcatgctgaccacattcacctgcatacataaggaaacaaaggagaaaatcaagtacgacgactacaagaaactctccgacgaagagaaggcgcaatacaatgtctatccgaaaatgcaggtgttccgggtgttcaatgtcgcccagaccaacctgcaggaggctcgaccggagttatgggagcagttggaaagagagaacgggaaaagggtcgaaaacggcgaacatttcagttttgggcctgtcgatgcgatgataaaggacaacctttggatttgtcccatcaaaccgacgcaccaaaacgaagcatactactcaatcacaaagaacgagattgtcgtacccgaaaaggagcagttcagagacggggaatctttctacggaacgctgttccatgagatggtccattccacgggtgccgaaggtgtgcttgaccgactccaacctacctctttcggttcgaaagagtatgcccgcgaggaactggtggccgaactgggcagcgcgttggtcgcacaacgctacggcatgaccaagcatataaaggaagacagttgcgcatacctcaaagggtggctcgatgagttgaaagaatccccacagtttatcaagacaacgcttctggacgtgaaaagagcttcgtcaatcgttactcaaaaggtggataagattgcgcaggagttggaacaaaatgttaccgaagagcaagaggacaaacgctctgccaaggaacgtattttttatgcttcggtggcctatctccaaaccgctgacgacacgaagcaactggacgaattgaaggacaaaggcgactacaagggtctgcttgcgctcgccaaggagtattacgacggcaacggcatggacgagcagcatacatacgcttctcccctccagaaccggggcgatgacctgctgattgaagataaggactttgccgtggtgtacaacggaagtgtcggaggcacatacgacatcatgctgaaatacacggaacaggaggtgcgggaccatatcacacgttacggcacagaccgtgccagcgatgatgtgaaagaggtggccaaagatatggcggcggaacagtttgctgaactgacacatcagagaatgccggtattcgaaatgccaaacggagatattctgtatgcaaggtacaacagggacaaggatacgctggacgtgggtacggccaccaatgcagggatggccgtacaacatcattacccttatgaccacaacatgacgctggaggccaacctgcaagccgtgaacgagaagctgaacgagcttgaagaatacagggaggagctacaagaggcggaatatggcggcggtctgcgtcggtaacggcagcgtaatatgaagaatgtggagcgatttcatactgaaggcgctccacatccttatagtccctaccggttttcattccgctacagactatatgttatcattacgacagcagtttgtcaatcattgactgtaactgcagcatatcgcaatattgattgtttccgccggtataatcctttgcgtgccgggcagtccgtatcatgaacgaaccgagttctatctttatcccatcatccatccgcacatccgcagaatggtttatgtatacaaacttaccattacgttcaataaagcaacttgtataataatgccccttattctcggatacgaccgccgcatccacggcttctgcatatttggatatttcacgtagcaatgccgtttggaaattactgtaccttaattccgcaacactattacaaatataactttttaagtacctgagcaacaaaaagttgctcaggaatttgccatgtcagatttttcacctatcttagtgttgcaaatcaaaatatgtatcaaacccgacagacatggcaaaggtagcaattaaatccgagaaactcactccttttggaggaatattttcaataatggagcaatttgactccagactctcatctgtaatcgactcaaccctcggtatgagatgcaggctgtatggttatcaatacagcgaaatcatccgttcgcttatgagcgtttatttttgtggcggctcatgcatcgaggatgtcaccactcatctgatgtaccacctttcgcttcatccgacacttcgcacatgcagtgccgacacgattcttagagccataaaggaactgacccaggataacatttcctacacatccgacactggcaagacctacgacttcaacacggcagacaagctgaatacactgctcctcaattgcctattgtccacagggcagctgaaagagggcgaggggtatgacgttgacttcgaccaccagttcatagaggctgagaagtttgatgcgaagcctacatacaagaagttccttggttatcgccctggcgtggcggttattggcaacttgattgtcggcattgagaacagcgacggcaacacaaatgtccgtttccaccagaaggacacgctgaagaggttctttgaaaggtttgaacaaaacaagcttattatcaaccgtttcagagctgattgcggctcgtgttctgaagagatagtggaagagattgctaaacactgcaagaccttctatatccgtgctaaccgatgcagttcgctctacaatgacatctttgccctcagaggttggaagaaagtggaattgggcggcattgagtttgagctggcctccattctcatcgagaaatggaaagggaaggcataccgtcttgtgattcaaagacagaagcggatagacggcgaactcgacctgtgggaaggagaatacacctaccgctgcatccttacaaatgactacgagtcttccgagaaagagattgtcgaattctataacctccgtggagggaaggaacgcatcttcgatgatatgaataacggattcggctggaacaggcttccaaaatcctttatgggagaaaacacggtgtttcttctgcttatggcactcatacgcaacttctataaattcatcatggcgaggcttgacgtgaagaggttcggactcaaagcaacaagccgcatcaagacgtttgtctttaagttcatctctgtgccagccaaatgggtcaggacatcaaggaagtatgtgctgaatatctattcatgcaacaatgcttatgccaatgtgttccagaatgactttggataacaccgacaacttatagtcgtgattttgcgtattgcctcaagtcgcatggtggggtaaggggcatttatatgtctttatggtgacattcgatgcactgtgccccctttttactaacgatgcagattcttttcgcttctgtatcatattaggcgcgtagttgcggatttgaggctgtattcctttgaaacataagtttctgcgtctgcaaggacagaagattgccattgggtataaaaagtctgtgtcatattctttcaattctaattctgtaaataaattaggcacatagcaataaaagtattgaatttatagtattcaattaacatttaagcaattaccatgatgttttcagagaccaaaattacggagatttattgtatgacagatgatttttgcaaagaaattgctcaatttcaggaaaaatatatggttgaagataaagatattgaatattccatgccccacttcctttaatataactttatttccaactccctttctaccataacagcatactgtttttgaaagaagcccgccattgatgtatgtttttcaaagacgggcaactggctatattttgaattatactcacgttaaatagctttcccaattctctttgtcgatagttaatttgttcatttcccaatcgtattccacttccggtatatcggaataagggaagtgcacggtatagcctatctgtccgtaggagcaatgcagcggtacaacgcaaatttcctgaccgcaataagactgtggcgtacagtatttcttccaatcaaaacggcctgcaactatattgcagcagagcagttttagagccattatgcctttccaactctgaaaatctttcttgtaacttgctcttttcataatgaataccatttaatgagccatgttgtagtaaatttcgggttcgctcgatacgttgtaaatctgactcccgcaacgtaccaatagggcgttttttccgtagtaaagctgcttcatgccggttatgttccccgtgcggtgaaagtttgggaaacggcttattcctgccttttcggcgtctcgtgtgtagagggttttcgttctcattgcatggttgtttttaatgtttcataaagtttttctatcatggcttccgcctgctccatatcgctcacgatgtctttgattcggtaaggtgcgccgttcttgccatgcccgtccgtaccaatccacaggtaggcttcatagtcggggtcgaagtcttcgtaatatgtttcaacttcctgtaacaagctgtcggtgtcattgcctttcatctcaaccgagaaactgaaatcctgcccgtgaggtgtgtattgctgaaaatcgaacaccacgaggttcggtttgtcggtatcggttttaacttgccagcctaattgttcagctatggcgataatctgttctattgctgtcattgttctgtttttttatttcccttttcttgaagccttccgacttcgcccaaagggttgatttttacgtgcaattcccaacggcgaaagcaagaacagcaggcaaggaacggaggttaaaattttatgaaatgccgcaatctgcgattgcggaaagtttgcgtcaaattttatccggagtagcgaagcggtacttgacacgctgttcgttcgccgtacctttgctgcgtaaaaacaggccgtggcgatagtggagattccatgaaatgatacgcccaagcatacaaagggaatggaggcaaagatctccggccgttacaacaggaaacgacggcagtatgtgtctggggtataaagggcaaaaaaaacgtcgaacgattgtccatcggacaaaatgtaagggaatggaaaaagaattgtctgtataacagaatgttcgacatggcctt
